(19) United States
(12) Patent Application Publication
(10) Pub. No.: US 2024/0174752 A1
(43) Pub. Date: May 30, 2024

(54) MODULATING PRODUCT QUALITY OF ASYMMETRIC MULTISPECIFIC ANTIBODIES THROUGH THE USE OF TEMPERATURE

(71) Applicant: AMGEN INC.

(72) Inventors: Li ZHANG, Camarillo, CA (US); Hedieh BARKHORDARIAN, Newbury Park, CA (US); Ewelina ZASADZINSKA, Thousand Oaks, CA (US); Jonathan DIEP, Thousand Oaks, CA (US)

(73) Assignee: AMGEN INC., Thousand Oaks, CA (US)

(21) Appl. No.: 18/284,590

(22) PCT Filed: Apr. 26, 2022
(86) PCT No.: PCT/US22/26261

§ 371 Date: Sep. 28, 2023

(51) Int. Cl. C07K 16/28; C07K 14/54

(52) U.S. Cl. CPC C07K 16/2818; C07K 14/54; C07K 2317/31; C07K 2319/30

(57) ABSTRACT

The present invention relates to the field of biopharmaceutical manufacturing. In particular, the invention relates to using temperature as a lever to modulate product quality during upstream operations.

[0001] This application claims the benefit of U.S. Provisional Application No. 63/180,220, filed Apr. 27, 2021, which is hereby incorporated by reference in its entirety and for all purposes as if fully set forth herein.

### SEQUENCE LISTING

[0002] Incorporated by reference in its entirety is a computer-readable nucleotide/amino acid sequence listing submitted concurrently herewith and identified as follows: 792,009 byte ASCII (Text) file named “A-2777-WO01-SEC_SeqListing.txt”; created on Mar. 8, 2022.

### FIELD OF DISCLOSURE

[0003] The present invention relates to the field of biopharmaceutical manufacturing. In particular, the invention relates to using temperature as a lever to modulate product quality during manufacturing operations, particularly during upstream cell culture operations.

### BACKGROUND

[0004] Monoclonal antibody biotherapeutics are the largest sector of the biopharmaceuticals market. However, because monoclonal antibodies can only bind to a single target, they are limited in their effectiveness as many diseases are multifactorial. Engineered multispecific antibodies are being developed to meet these challenges. These multispecific antibodies can have any number of unique peptide sequences and can be designed with multi-target affinity. The unique properties of these proteins offer improvements over traditional monoclonal antibody therapeutics and are proving to be effective next-generation biotherapeutics that can take advantage of an enormous variety of formats to meet even more challenging therapeutic indications.

[0005] However, there is not much information related to manufacturing multispecific antibodies, particularly those that are asymmetric in structure, so platforms and processes developed for monoclonal antibodies are often applied with varying degrees of success. Asymmetric multispecific antibodies are highly engineered and subjecting such proteins to upstream and downstream manufacturing processes under conditions typical for monoclonal antibodies can influence the product quality of the expressed and/or purified proteins. For example, production of product-related impurities during cell culture can complicate downstream purification operations and lower the product quality of the desired asymmetric multispecific drug product. It would therefore be beneficial to optimize conditions during upstream manufacturing operations of asymmetric multispecific antibodies to lessen any negative impact on product quality.

[0006] The invention described herein meets this need by making use of temperature as a lever during cell line development and cell culture operations to improve the product quality of recombinant asymmetric multispecific antibody drug substances.

### BRIEF SUMMARY OF THE INVENTION

[0007] The invention provides a method for modulating the product quality of a recombinant asymmetric multispecific antibody expressed by a cell during cell culture comprising the steps: (a) establishing at least two cell cultures each inoculated with the same cell line expressing the asymmetric multispecific antibody; (b) culturing at least one cell culture at a first temperature regime that consists of a single temperature and at least one cell culture at a second temperature regime; (c) comparing at least one product-related impurity in the cell culture at each temperature regime; (d) selecting the temperature regime that reduces the expression of at least one product-related impurity comprising an unpaired or mis-paired long heavy chain; (e) culturing the cell line at the selected temperature regime; and (f) harvesting the recombinant asymmetric multispecific antibody. In one embodiment the first temperature regime is selected from 36° C. to 37° C. In one embodiment the second temperature regime comprises a temperature shift from a first temperature to a second temperature that is higher or lower than the first temperature. In a related embodiment the second temperature is selected from 28° C. to 35° C. In a related embodiment the second temperature is about 1° C. to about 9° C. lower than the first temperature. In one embodiment the first temperature regime is a single temperature from 36° C. to 37° C. and the second temperature regime comprises at least one temperature shift from a first temperature of 36° C. to 37° C. to a second temperature of 28° C. to 35° C. In one embodiment the product-related impurity results from an imbalance in the ratio of long heavy chain to short heavy chain. In one embodiment the product-related impurity comprises an unpaired or mis-paired long heavy chain. In a related embodiment the product-related impurity comprises an unpaired or mis-paired long heavy chain and is selected from a homodimer, half antibody, protein aggregate, antibody fragment, combination of antibody fragments, and unpaired antibody fragments. In one embodiment the cell culture temperature regime may be further selected for modulation of the amount of expression, productivity, growth, yield, and/or other desired product quality attributes of the asymmetric multispecific antibody. In one embodiment the asymmetric multispecific antibody comprises a mutein. In one embodiment the asymmetric multispecific antibody is an asymmetric multispecific anti-PD-1 antibody comprising a single IL-21 mutein attached to one of the two antibody heavy chains of the anti-PD-1 antibody. In a related embodiment the long heavy chain comprises an anti-PD-1 antibody heavy chain having an attached IL-21 mutein.

[0008] The invention provides a method for modulating the product quality of a recombinant asymmetric multispecific antibody comprising a mutein expressed by a cell during cell culture comprising the steps: (a) establishing at least two cell cultures each inoculated with the same cell line expressing the asymmetric multispecific antibody; (b) culturing at least one cell culture at a first temperature regime that consists of a single temperature and at least one cell culture at a second temperature regime; (c) comparing at least one product-related impurity comprising an unpaired or mis-paired long heavy chain produced by a cell culture at each temperature regime; and (d) selecting the temperature regime that reduces the expression of at least one product-related impurity comprising an unpaired or mis-paired long heavy chain. In one embodiment the mutein is an IL-21 mutein. In a related embodiment the IL-21 mutein comprises amino acid substitutions at any two of positions 5, 9, 73, and 76 of SEQ ID NO: 1; wherein said amino acid substitutions are selected from: A, E, or Q at position 5. E or A at position 9. A or Q at position 73, and A, D, or E at position 76. In a related embodiment the IL-21 mutein comprises the amino acid sequence of any of SEQ ID NOs: 233-245. In one embodiment the asymmetric multispecific antibody comprises a mutein attached to the C-terminus of one of the two antibody heavy chains of an anti-PD-1 antibody. In a related embodiment the anti-PD-1 antibody comprising: two light chains, each comprising a LC CDR1, LC CDR2, and LC CDR3 comprising the amino acid sequence of SEQ ID NOs: 385, 386, and 387, respectively; and two heavy chains, each comprising a HC CDR1, LC CDR2, and LC CDR3 comprising the amino acid sequence of SEQ ID NOs: 382, 383, and 384, respectively. In a related embodiment the anti-PD-1 antibody comprises two light chains comprising the amino acid sequence of SEQ ID NO: 389 and two heavy chains comprising the amino acid sequence of SEQ ID NO: 388. In a related embodiment in the anti-PD-1 antibody comprises: two light chains, each comprising a LC CDR1, LC CDR2, and LC CDR3 comprising the amino acid sequence of SEQ ID NOs: 365, 366, and 367, respectively; and two heavy chains, each comprising a HC CDR1, HC CDR2, and HC CDR3 comprising the amino acid sequence of SEQ ID NOs:362, 363, and 364, respectively. In a related embodiment the anti-PD-1 antibody comprises two light chains comprising the amino acid sequence of SEQ ID NO: 369 and two heavy chains comprising the amino acid sequence of SEQ ID NO: 368. In a related embodiment the anti-PD-1 antibody comprises: (i) two light chains, each comprising the amino acid sequence of SEQ ID NO: 391; a heavy chain attached to an IL-21 mutein comprising the amino acid sequence of any one of SEQ ID NOs: 501-506;

[0009] and a heavy chain comprising the amino acid sequence of any one of SEQ ID NOs: 556-558; or (ii) two light chains, each comprising the amino acid sequence of SEQ ID NO: 371; a heavy chain attached to a single IL-21 mutein comprising an amino acid sequence of any one of SEQ ID NOs: 513-518; and a heavy chain comprising the amino acid sequence of any one of SEQ ID NOs: 559-561. In a related embodiment the anti-PD-1 antibody comprises: two light chains, each comprising the amino acid sequence of SEQ ID NO: 391; one heavy chain comprising the amino acid sequence of SEQ ID NO: 556; and one heavy chain attached to an IL-21 mutein comprising the amino acid sequence of SEQ ID NO: 501. In a related embodiment the anti-PD-1 antibody comprises: two light chains, each comprising the amino acid sequence of SEQ ID NO: 371; one heavy chain comprising the amino acid sequence of SEQ ID NO: 559; and one heavy chain attached to an IL-21 mutein comprising the amino acid sequence of SEQ ID NO: 513. In one embodiment the asymmetric multispecific antibody comprises an IL-21 mutein attached to the C-terminus of one of the two antibody heavy chains of an anti-PD-1 antibody. In one embodiment the long heavy chain comprises an anti-PD-1 antibody heavy chain having an attached IL-21 mutein.

[0010] The invention provides a method for modulating the product quality of a recombinant asymmetric multispecific antibody expressed by a cell during cell culture. The invention provides a method for modulating the product quality of a recombinant asymmetric multispecific antibody comprising a mutein expressed by a cell during cell culture. In particular, the invention provides a method for modulating the product quality of a conjugate of an IL-21 mutein linked to the C-terminus of one of the two antibody heavy chains of an anti-PD-1 antibody expressed by a cell during cell culture comprising the steps: (a) establishing a cell culture inoculated with a cell line expressing the antibody; (b) culturing the cells at 36±1° C. for the duration of the culture; and (c) harvesting the antibody; wherein amount of at least one product-related impurity resulting from an imbalance in the ratio of long heavy chain to short heavy chain in the harvested cell culture is decreased compared to the amount of the same product-related impurity in the harvest from a cell culture exposed to a temperature of 32° C. to 34° C. at some point during the culture.

[0011] The invention provides a method for selecting a cell line expressing an asymmetric multispecific antibody. The invention provides a method for selecting a cell line expressing an asymmetric multispecific antibody comprising a mutein comprising the steps: a) establishing at least one clonally derived cell line expressing the antibody; b) establishing at least two cell cultures from one or more of the clonally derived cell lines, wherein at least one cell culture from each cell line is cultured at a first temperature regime and at least one cell culture from each cell line is cultured at a second temperature regime; c) comparing the expression of at least one product-related impurity comprising an unpaired or mis-paired long heavy chain produced by the cells cultured at each temperature regime; and (d) selecting a cell line that resulted in reduced expression of at least one product-related impurity comprising an unpaired or mis-paired long heavy chain. In one embodiment the selected cell line is then cultured at the temperature regime that resulted in reduced expression of at least one product-related impurity comprising an unpaired or mis-paired long heavy chain. In one embodiment the first temperature regime is selected from about 36° C. to about 37° C. In one embodiment the second temperature regime comprises a temperature shift from a first temperature to a second temperature that is higher or lower than the first temperature. In a related embodiment the second temperature is selected from about 28° C. to about 35° C. In one embodiment the second temperature is about 1° C. to 9° C. lower than the first temperature. In one embodiment the first temperature regime is a single temperature from 36° C. to 37° C. and the second temperature regime comprises at least one temperature shift from a first temperature of 36° C. to 37° C. to a second temperature of 28° C. to 35° C. In one embodiment the product-related impurity comprising an unpaired or mis-paired long heavy chain results from an imbalance in the ratio of long heavy chain to short heavy chain. In a related embodiment the product-related impurity comprising an unpaired or mis-paired long heavy chain results from an increase in the ratio of the long heavy chain to the short heavy chain. In one embodiment the product-related impurity comprising an unpaired or mis-paired long heavy chain and is selected from a homodimer, half antibody, protein aggregate, antibody fragment, combination of antibody fragments, and unpaired antibody fragments. In one embodiment the cell culture temperature regime may be further selected for a temperature regime that also modulates the amount of expression, productivity, growth, and/or other desired product quality attributes of the asymmetric multispecific antibody. In one embodiment the asymmetric multispecific antibody is an asymmetric multispecific anti-PD-1 antibody comprising a single IL-21 mutein attached to one of the two antibody heavy chains of the anti-PD-1 antibody. In one embodiment the long heavy chain comprises an anti-PD-1 antibody heavy chain having an attached IL-21 mutein.

[0012] The invention provides a method for modulating production of at least one recombinant asymmetric multispecific antibody product-related impurity comprising an antibody heavy chain. The invention provides a method for modulating production of at least one recombinant asymmetric multispecific antibody product-related impurity comprising a long heavy chain. In particular the invention provides a method for modulating production of at least one recombinant asymmetric multispecific antibody product-related impurity comprising an antibody heavy chain having an attached IL-21 mutein during cell culture through cell culture temperature comprising the steps: selecting the temperature regime that reduces the expression of at least one product-related impurity comprising an unpaired or mis-paired long heavy chain comprising a long heavy chain; (a) culturing the cell line at the selected temperature regime; and (b) harvesting the recombinant asymmetric multispecific antibody. In one embodiment the asymmetric multispecific antibody is an asymmetric multispecific anti-PD-1 antibody comprising a single IL-21 mutein attached to one of the two antibody heavy chains of the anti-PD-1 antibody. In one embodiment the long heavy chain comprises an anti-PD-1 antibody heavy chain having an attached IL-21 mutein.

[0013] The invention provides a method for producing an isolated, purified, recombinant asymmetric multispecific antibody, the method comprising the steps: a) isolating at least one single stably transformed cell expressing the asymmetric multispecific antibody and establishing a clonally derived culture; b) establishing at least two cell cultures from one or more of the clonally derived cultures; c) culturing at least one cell culture from each clonally derived culture at a first temperature regime comprising a single temperature and culturing at least one cell culture from each clonally derived culture at a second temperature regime; d) comparing the amount of at least one product-related impurity comprising an unpaired or mis-paired long heavy chain produced by the cells cultured at each temperature regime; e) selecting the cell culture that modulated production of the product related impurity; f) establishing a cell line expressing the asymmetric multispecific antibody from the selected cell culture; g) inoculating a bioreactor with the cell line expressing the asymmetric multispecific antibody; h) culturing the cells to express the asymmetric multispecific antibody at the temperature regime that modulated the production of the product-related impurity; i) harvesting the recombinant asymmetric multispecific antibody from the cell culture; j) processing the recombinant multispecific antibody through one or more chromatography unit operations; and k) obtaining an isolated, purified, recombinant asymmetric multispecific antibody. In one embodiment is provided an isolated, purified, recombinant multispecific antibody according to the method above. In one embodiment is provided a pharmaceutical composition comprising the isolated, purified, recombinant multispecific antibody according to the method above. In one embodiment the asymmetric multispecific antibody is an asymmetric multispecific anti-PD-1 antibody comprising a single IL-21 mutein attached to one of the two antibody heavy chains of the anti-PD-1 antibody. In one embodiment the long heavy chain comprises an anti-PD-1 antibody heavy chain having an attached IL-21 mutein.

[0014] The invention provides a method for controlling the growth of cells in a nanofluidic chamber of a nanofluidic chip comprising the steps of: (a) isolating a single cell in to a nanofluidic chamber of a nanofluidic chip, wherein said cell comprises an expression construct capable of expressing a recombinant protein; (b) culturing the cell at a first temperature; (c) at a predetermined point, culturing the cells at a second temperature; and (d) exporting the cells out of the nanofluidic chamber and into a culture vessel.

[0015] The invention also provides a method for minimizing cross contamination during export of cells grown in a nanofluidic chamber of a nanofluidic chip comprising the steps of: (a) isolating a single cell in to a nanofluidic chamber of a nanofluidic chip, wherein said cell comprises an expression construct capable of expressing a recombinant protein; (b) culturing the cell at a first temperature; (c) at a predetermined point, culturing the cells at a second temperature; and (d) exporting the cells out of the nanofluidic chamber and into a culture vessel; wherein the number of cells per chamber at export is lower compared to a single cell cultured under similar conditions a constant temperature for the duration of the culture.

[0016] The invention further provides a method to improve clone selection for cells grown in a nanofluidic chamber of a nanofluidic chip comprising the steps of: (a) isolating a single cell in to a nanofluidic chamber of a nanofluidic chip, wherein said cell comprises an expression construct capable of expressing a recombinant protein; (b) culturing the cell at a first temperature; (c) lowering the temperature of the culture to a second temperature no earlier than day 3 of the culture; and (d) exporting the cells out of the nanofluidic chamber at least four days after the temperature shift.

[0017] In one embodiment the number of cells per chamber at export is lower compared to a single cell cultured under similar conditions at a constant temperature for the duration of the culture. In one embodiment the first temperature is selected from 35° C. to 37° C. In one embodiment the second temperature is selected from 28° C. to 34° C. In one embodiment the second temperature is about 1° C. to about 9° C. lower than the first temperature. In one embodiment the first temperature is 36° C. and the second temperature is 32° C. to 32.5° C. In one embodiment the predetermined point is on day 3 to day 5 of the culture. In one embodiment export is on day 6 to day 8 of the culture. In one embodiment the nanofluidic chip comprises 1758 chambers, 3,500 chambers, 11,000 chambers, 14,000 chamber, or 20,000 chambers. In one embodiment the culture vessel is a multi-well plate. In one embodiment the protein secretion profiles before and after the temperature shift are compared.

### BRIEF DESCRIPTION OF THE FIGURES

[0018] FIG. 1 (A) Shows an increase in the % long heavy chain (% LHC) when cells expressing an IL-2-anti-PD-1 conjugate were subjected to perfusion culture (P) with a temperature shift to 32.5° C. (open bars), compared to fed batch culture (FB) at a constant 36° C. (striped bars). (B) and (C) Show the results of the production of an IL-2-anti-PD-1 conjugate expressed by cells in a perfusion culture (P) with a temperature shift from 36° C. to 32.5° C. subjected to purification by Protein A affinity chromatography (left open bar) and cation exchange chromatography (right open bar) compared to the production of an IL-2-anti-PD-1 conjugate expressed by cells in a constant temperature (36° C.) fed batch culture (FB) subjected to Protein A affinity chromatography only (striped bar). (B) % Pre-Peaks by nrCE. (C) % low molecular weight impurities (LMW) by SEC. (D) Shows impurities characterization by nr CE-SDS from the CEX pool. Excess long heavy chain could not be separated by CEX.

[0019] FIG. 2 Shows that there was better correlation between the fed batch samples and the perfusion samples when they were screened at the same temperature, comparing the Molar Ratio of the long heavy chain (LHC) to the short heavy chain (SHC) as determined by rCE. (A) shows fed batch culture samples grown at a constant 36° C. compared to perfusion samples grown with a temperature shift (TS) from 36° C. to 32.5° C. Fed Batch (x, constant 36° C.) vs. Perfusion (y, 36° C. to 32.5° C.). (B) shows fed batch culture samples compared to perfusion samples that were both grown with a temperature shift (TS) from 36° C. to 32.5° C. Fed Batch on the x axis vs. Perfusion on the y axis. The data points for both culture methods grown at a constant 36° C. were limited and not included in the comparison.

[0020] FIG. 3 Shows that there was better correlation between the fed batch samples and the perfusion samples if they were screened at the same temperature, comparing the percent low molecular weight (% LMW) determined by SEC. (A) shows fed batch culture samples grown at a constant 36° C. compared to perfusion samples grown with a temperature shift (TS) from 36° C. to 32.5° C. Fed Batch on the x axis vs. Perfusion on the axis. (B) shows fed batch culture samples compared to perfusion samples, both grown with a temperature shift (TS) from 36° C. to 32.5° C. Fed Batch on the x axis vs. Perfusion on the y axis. The data points for both culture methods grown at a constant 36° C. were limited and not included in the comparison.

[0021] FIG. 4 Shows the results of the production of an IL-2-anti-PD-1 conjugate expressed by cells in a perfusion culture at a constant temperature of 36° C. compared to a perfusion culture with a temperature shift from 36° C. to 32.5° C. (A) shows the Molar Ratio of the long heavy chain (LHC) to the short heavy chain (SHC) as determined by rCE (Constant 36° C., black bars. Temperature shift from 36° C. to 32.5° C., gray bars). (B) shows the % Pre-Peak 6 (impurities formed by SHC) as determined by nrCE, purification by Protein A affinity chromatography (black bars) and cation exchange chromatography (gray bars). (C) shows % Pre-Peak 7 (impurities formed by subjected by LHC) as determined by nrCE, purification by Protein A affinity chromatography (black bars) and cation exchange chromatography (gray bars).

[0022] FIG. 5 Shows the results of Bispecific A clone 1 production by fed batch culture when temperature is held at constant 36° C. (black bar) and with temperature shift from 36° C. to 32.5° C. (gray bar). (A) Molar ratio of long heavy chain (LHC) to short heavy chain (SHC) as determined by rCE-SDS. (B) % HMW by SEC. (C) % LMW by SEC (impurities formed by LHC).

[0023] FIG. 6 Shows the results of Bispecific A clones 2 and 3 production by mock perfusion culture when temperature is held at constant 36° C. (black bar) and with temperature shift from 36° C. to 32.5° C. (gray bar). (A) Molar ratio of long heavy chain (LHC) to short heavy chain (SHC) as determined by rCE-SDS. (B) % LMW as determined by SEC. (C) Transcript ratio of LHC to SHC as determined by ddPCR.

[0024] FIG. 7 Shows the results of Bispecific B clones 1, 2, and 3 production by fed batch culture when temperature is held at constant 36° C. (black bar) and with temperature shift from 36° C. to 32.5° C. (gray bar). (A) Molar ratio of the long heavy chain (LHC) to the short heavy chain (SHC) as determined by rCE-SDS. (B) % HMW2 as determined by SEC. (C) % LMW1 as determined by SEC. (D) Transcription ratio of LHC to SHC as determined by ddPCR.

[0025] FIG. 8 Shows the results of Bispecific B clones 2, and 3 production by mock perfusion comparing culture at a constant temperature of 36° C. (black bar) with a temperature shift from 36° C. to 32.5° C. (gray bar). (A) Molar ratio of the long heavy chain (LHC) to the short heavy chain (SHC) as determined by rCE-SDS. (B) % HMW2 as determined by SEC. (C) % LMW1 as determined by SEC.

[0026] FIG. 9 Shows that temperature shift implemented during on chip culture results in growth inhibition and allows for long-term culture. (A) Representative brightfield chamber images collected throughout experiment duration on Berkeley Lights Bacon platform, where single cells expressing monoclonal antibody were loaded on a chip into individual chambers and the chip was cultured for 6 days at 36° C. The cell counts generated by the instrument software are displayed below each timepoint. Cell population on day 6 occupied majority of the chamber content and expanded close to the neck area of the chamber, preventing reliable secretion assessment through Spotlight™ Human Fc Assay and creating high risk of cross contamination during potential export procedure. (B) Representative brightfield chamber images collected throughout experiment duration on Berkeley Lights Bacon platform, where single cells expressing monoclonal antibody were loaded on a chip into individual chambers and the chip was cultured for 3 days at 36° C. and temperature was subsequently reduced to 32° C. for the remaining experiment duration. The cell counts generated by the instrument software are displayed below each timepoint. Temperature shift implemented from Day 4 resulted in growth inhibition and prevented cell expanding above the maximum recommended height of the chamber. (C) Average doubling time (top panel) and average number of cells per chamber (bottom panel) measured on each day throughout experiment duration. Implementing temperature shift from Day 4 resulted in growth inhibition manifested by increased average doubling time and decreased average cell counts when compared to the control condition.

[0027] FIG. 10 Shows that implementing temperature shift during CLD workflow on the Berkeley Light Beacon platform alters monoclonal antibody production profiles. (A) Schematic representation of standard Cell Line Development cloning workflow on the Beacon platform (left panel) and Cell Line Development cloning workflow with temperature shift (right panel) implemented in B and C. (B) Normalized secretion score data corresponding to Spotlight™ Human Fc Assay conducted before temperature shift on Day 4 (left panel) and after temperature shift on Day 6 (right panel). Cell secretion profiles measured after temperature shift showed more diverse distribution allowing better distinction of highly producing clones form poorly secreting cell lines. (C) Brightfield and Spotlight™ Human Fc Assay fluorescent images collected throughout experiment duration on Berkeley Lights Bacon platform corresponding to two clonally derived cell lines expressing monoclonal antibody where CLD workflow with temperature shift was implemented. The cell counts generated by the instrument software and normalized Secretion score are displayed below each timepoint. Incubation in decreased temperature conditions resulted in growth arrest for both clones. While both cell lines demonstrated comparable secretion profiles on Day 4 of the workflow. Clone 1 but not Clone 2 displayed increased secretion levels in response to temperature shift.

[0028] FIG. 11 Shows that implementing temperature shift during CLD workflow on the Berkeley Light Beacon platform achieves growth inhibition and alters recombinant protein production profiles for cell lines expressing IgG4 monoclonal antibodies and multispecific antibody formats. (A)(D) Average doubling time (top panel) and average number of cells per chamber (bottom panel) measured on each day throughout experiment duration for clonally derived cell lines expressing IgG4 monoclonal antibody and multispecific antibody, respectively. Temperature settings for each timepoint of the experiment are outlined on the top of the graph. Implementing temperature shift from Day 4 or Day 3, respectively, resulted in growth inhibition measured by increased doubling time and decreased cell counts for both IgG4 and multispecific antibody expressing cell lines. (B)(E) Representative brightfield chamber images collected throughout experiment duration on Berkeley Lights Bacon platform of clonally derived cell lines expressing monoclonal antibody or multispecific antibody, respectively. The cell counts generated by the instrument software are displayed below each timepoint. (C)(F) Spotlight™ Human Fc Assay score data corresponding to Day 4 and Day 8 or Day 7 timepoints, respectively. Secretion profiles achieved after prolonged incubation in decreased temperature showed more diverse distribution allowing better distinction of highly producing clones form poorly secreting cell lines.

[0029] FIG. 12 Shows that export procedure conducted at 32° C. temperature results in similar clone recovery when compared to export executed at 36° C. per standard CLD workflow. (A)(B) Top panel: schematic representation of standard Cell Line Development cloning workflow on the Beacon platform and Cell Line Development cloning workflow with temperature shift implemented during export process, respectively. Bottom panel: representative images of 96 well export plates acquired 18 days after export procedure showing comparable clone recovery efficiency regardless of export temperature implemented at the single cell cloning stage.

### DETAILED DESCRIPTION OF THE INVENTION

[0030] Monoclonal antibodies are symmetrical, having two identical polypeptide chains, each pair having one “light” chain (LC) and one “heavy” chain (HC), and are specific for one target. Multispecific antibodies that bind, neutralize, and/or interact with more than one target are being engineered in an ever-increasing variety of compositions and configurations and in an increasing variety of formats to meet ever more challenging therapeutic indications that offer alternatives and improvements over monoclonal antibodies. Many multispecific antibodies share characteristics with monoclonal antibodies, such as having one light and one heavy chain, however, unlike monoclonal antibodies, the heavy chains of multispecific antibodies can be asymmetric.

[0031] “Asymmetric” multispecific antibodies comprise heavy chains that differ in length. A heavy chain typically comprises a fragment antigen binding (FAB) region comprising a variable domain (Vh) and a constant domain (C_{H}1), a fragment crystallizable (Fc) region that comprises two constant domains (C_{H}2 and/or C_{H}3), and a hinge region connecting the Fab and Fc regions. Asymmetric multispecific antibody heavy chains may comprise some or all of these components. In addition, the heavy chain may also comprise one or more additional components, attached directly and/or indirectly to any point in a variable domain and/or a constant domain of the heavy chain. The length of the heavy chain is determined based on the combined size of the amino acid sequences of all the components that make up the heavy chain, including any variable domain(s), constant domain(s), hinge regions, attached proteins and/or peptides and any linkers and/or other attachment mechanisms. The heavy chain having the longest combined amino acid sequence is referred to as the “long heavy chain”. The heavy chain with the shorter combined amino acid sequence is referred to as the “short heavy chain”. Asymmetric multispecific antibodies have at least one long heavy chain and at least one short heavy chain. The asymmetric multispecific antibodies bind, neutralize, and/or interact specifically with the at least two different antigens or targets, and/or different epitopes on the same antigen or target.

[0032] In one embodiment the long heavy chain of an asymmetric antibody comprises an attached mutein. In one embodiment the asymmetric multispecific antibody is an anti-PD1 antibody comprising a long heavy chain and a short heavy chain. The long heavy chain comprises a single IL-21 mutein attached to one of the two antibody heavy chains of the anti-PD-1 antibody, the short heavy chain comprising the other anti-PD-1 antibody heavy chain. In one embodiment the long heavy chain comprises an IL-21 mutein attached to the Fc of the anti-PD-1 antibody. In one embodiment the long heavy chain comprises an IL-21 mutein directly attached to the Fc of the anti-PD-1 antibody without a linker. In one embodiment the long heavy chain comprises an IL-21 mutein directly attached to the C-terminus of one of the two antibody heavy chains of the anti-PD-1 antibody with or without a linker.

[0033] Producing and purifying asymmetric multispecific antibodies brings its own manufacturing challenges. The engineered origin and asymmetry of these antibodies makes them susceptible to formation of product-related impurities throughout the manufacturing process, especially during cell culture operations. The type and/or quantity of the impurity may impact the expression, purification, yield, activity, and/or product quality of these asymmetric multispecific antibodies. “Product-related impurity” refers to variants that may share one or more structural components with the desired product, such as an asymmetrical multispecific antibody. One example of a structural component is a long heavy chain of an asymmetric multispecific antibody. When such impurities are expressed during cell culture, they must be removed in downstream purification operations. The challenge to removing these impurities is increased depending on how similar the impurities are to the protein of interest, such as in composition, size, hydrophobicity, isoelectric point (pI), surface charge, and the like.

[0034] Balanced expression of the unique components that make up recombinant asymmetric multispecific antibodies is a challenge when expressing these proteins in culture. An imbalance in the expression of one or more components can lead to the formation of product-related impurities, such as unpaired and/or mis-paired protein variants. The degree of success in removing the product-related impurities can depend on the properties of the impurities. In addition, removal operations will result in some degree of product loss. As described herein, product-related impurities comprising an anti-PD-1 long heavy chain were found to be unexpectedly difficult to remove during purification operations and negatively impacted product quality, yield, and the robustness of the manufacturing process as a whole.

[0035] The molar ratio of long heavy chain to short heavy chain of asymmetrical multispecific antibodies that were produced during cell culture was found to be influenced by the culture temperature. As described in more detail herein and in the Examples, it was discovered that when clonal cells expressing asymmetric multispecific antibodies were subjected to a low temperature set point during the cell culture operation, as a result of a temperature shift (e.g., 36° C. to 34° C. or 32.5° C.). The molar ratio of long heavy chain to short heavy chain expressed by the clonal cells unexpectedly increased at the lower culture temperatures. In this instance, clonal cells expressing asymmetric multispecific antibodies that had been grown and selected using a typical cell line development processes that maintained a stationary, physiological temperature (e.g., 36° C.) during single cell cloning, scale up, and selection, as is typically done for clonal cells expressing other types of proteins such as monoclonal antibodies and symmetric multispecific antibodies. In one embodiment, the product-related impurity results from an imbalance in heavy chain expression. In one embodiment, the product-related impurity results from an imbalance in the ratio of long heavy chain to short heavy chain. In one embodiment, the product-related impurity results from an increase in the ratio of the long heavy chain to short heavy chain. No impact due to the pH of the cell culture was observed.

[0036] Temperature shifts are commonly used during the cell culture operations to influence cell growth and recombinant protein production of symmetric proteins. However, for cells expressing asymmetric multispecific antibodies such a temperature shift during cell culture may unexpectedly alter the ratio of the long heavy chain and short heavy chain that are expressed during the culture. The increase in the ratio of long heavy chain to short heavy chain was found to influence the formation and the type of product-related impurities. This altered ratio of the long and short heavy chains can impact the purification, activity, product quality, as well as the robustness of the manufacturing process as a whole.

[0037] It was found that the product quality of asymmetric multispecific antibodies could be modulated through the cell culture temperature. In particular, the invention provides a method for determining the temperature conditions which maintain a more balanced expression of long heavy chain to short heavy, and thereby reducing the formation of product-related impurities having unpaired and/or mis-paired long heavy chains. In one embodiment, the cell culture temperature regime may be further selected such that in addition to modulating heavy chain-related product-related impurities, the temperature also modulates expression, productivity, growth, and/or other desired product quality attributes of the asymmetric multispecific antibody.

[0038] As described herein, the impact of the unexpected temperature-induced imbalance of the expression of the long heavy chain of an asymmetric multispecific antibody was problematic for the manufacture of drug products comprising such proteins. Symmetric proteins, such as monoclonal antibodies, balanced expression of heavy chains may not be as critical since the chains are identical. However, for asymmetric multispecific antibodies having at least one long heavy chain and at least one short heavy chain, balancing expression of the heavy chain was found to be critical component of a robust manufacturing operation and the production of drug product having the desired yield and product quality attributes. An imbalance in the production of the long and short heavy chains increased the opportunity for the formation of product-related impurities resulting from unpaired or mis-paired long heavy chains. In one embodiment, the product-related impurity results from an imbalance in heavy chain expression. In one embodiment, the product-related impurity comprises an unpaired or mis-paired heavy chain. In one embodiment, the product-related impurity comprises an unpaired or mis-paired long heavy chain.

[0039] Product-related impurities include unpaired and/or mis-paired heavy chains. Exemplary product-related impurities include unpaired long heavy chains and/or mis-paired long heavy chains. Product-related impurities may be in the form of homodimers, half antibodies, aggregates, unpaired components, antibody fragments and/or various combinations of antibody fragments, and the like that comprise a long heavy chain. “Half antibodies” refer to a product-related impurity that can form, for example, due to incomplete assembly or disruption of the interaction between the two heavy chain polypeptides. Half antibodies comprise a single light chain polypeptide and a single heavy chain polypeptide. “Homodimers” refer to a product-related impurity that can form, for example, when heavy and light chains having specificity for the same target recombine with each other instead of pairing with heavy and light chains that have specificity to a different target to form a desired asymmetric multispecific heterodimer. This typically occurs during expression in the host cell. Product-related impurities in the form of homodimers, half antibodies, aggregates, antibody fragments and various combinations of antibody fragments, unpaired components, and the like include those having at least one long heavy chain.

[0040] In one embodiment, the product-related impurity comprises an unpaired long heavy chain. In one embodiment, the product-related impurity comprises a mis-paired long heavy chain. In one embodiment the product-related impurity is selected from a homodimer, half antibody, protein aggregate, antibody fragment, combination of antibody fragments, and unpaired components having an unpaired or mis-paired heavy chain. In one embodiment the product-related impurity is selected from a homodimer, half antibody, protein aggregate, antibody fragment, combination of antibody fragments, or unpaired antibody fragments having an unpaired heavy chain. In one embodiment the product-related impurity is selected from a homodimer, half antibody, protein aggregate, antibody fragment, or combination of antibody fragments having a mis-paired heavy chain. In one embodiment the product-related impurity is selected from a homodimer, half antibody, protein aggregate, antibody fragment, combination of antibody fragments, and unpaired components having an unpaired or mis-paired long heavy chain. In one embodiment the product-related impurity comprises a homodimer comprising a long heavy chain. In one embodiment the product-related impurity comprises a half-antibody comprising a long heavy chain. In one embodiment the product-related impurity comprises an aggregate comprising a long heavy chain. In one embodiment the product-related impurity comprises an antibody fragment comprising a long heavy chain. In one embodiment the product-related impurity comprises an unpaired antibody fragment comprising a long heavy chain.

[0041] The invention provides a method for selecting a cell culture temperature regime that modulates the amount of at least one asymmetric multispecific antibody product-related impurity comprising the steps: a) establishing at least two cell cultures each inoculated with the same cell line expressing the asymmetric multispecific antibody; b) culturing at least one cell culture at a first temperature regime that consists of a single temperature and at least one cell culture at a second temperature regime; c) comparing the amount of at least one product-related impurity in the cell culture at each temperature regime; and d) selecting the temperature regime that reduces the amount of the product-related impurity in the cell culture.

[0042] The invention provides a method for modulating the product quality of a recombinant asymmetric multispecific antibody expressed by a cell during cell culture comprising the steps: a) selecting the temperature regime that reduces the expression of at least one product-related impurity resulting from an imbalance in heavy chain expression, the impurity comprising an unpaired or mis-paired long heavy chain; culturing the cell line at the selected temperature regime; and harvesting the recombinant asymmetric multispecific antibody.

[0043] In one embodiment selecting the temperature regime comprises the steps of a) establishing at least two cell cultures each inoculated with the same cell line expressing the asymmetric multispecific antibody; b) culturing at least one cell culture at a first temperature regime that consists of a single temperature and at least one cell culture at a second temperature regime; c) comparing at least one product-related impurity in the cell culture at each temperature regime; and d) selecting the temperature regime that reduces the expression of at least one product-related impurity comprising an unpaired or mis-paired long heavy chain.

[0044] The invention provides a method for modulating the product quality of a recombinant asymmetric multispecific antibody expressed by a cell during cell culture comprising the steps: a) selecting the temperature regime that reduces the expression of at least one product-related impurity comprising an unpaired or mis-paired long heavy chain; b) culturing the cell line at the selected temperature regime; and c) harvesting the recombinant asymmetric multispecific antibody.

[0045] The invention provides a method for modulating production of at least one recombinant asymmetric multispecific antibody product-related impurity comprising a long heavy chain during cell culture through cell culture temperature comprising the steps a) selecting the temperature regime that reduces the expression of at least one product-related impurity comprising an unpaired or mis-paired long heavy chain comprising a long heavy chain; b) culturing the cell line at the selected temperature regime; and c) harvesting the recombinant asymmetric multispecific antibody.

[0046] The development of biotherapeutics relies on manipulating mammalian cells to secrete desired proteins. Successful development of a biotherapeutic is a lengthy, multiple step process that includes development of a clonal cell line expressing the biotherapeutic. Typical mammalian cell line development processes are resource intensive and require lengthy timelines due in part to the slow recovery of cells during selection, single cell cloning, and the need to perform multiple screening assays to identify suitable production hosts. Clone selection is one of the most labor-intensive steps during cell line development because of the need to screen large numbers of candidates in various protein production studies. The desired outcome from this process is the identification and isolation of a mammalian clonal cell line that expresses a therapeutic protein having desired product quality attributes while also conforming to desired manufacturing processes and operations with minimal impact.

[0047] Clonal cell line selection includes attributes desired in the expressed recombinant protein, such as titer, product quality, and/or growth characteristics, which can include a more balanced molar ratio of the heavy chains. When clonal cell line candidates that were selected under a single, constant temperature condition were grown in a bioreactor under conditions that incorporated at least one change or shift in temperature, the titer of the expressed recombinant protein and viable cell density were minimally impacted, but the molar ratio of long heavy chain to short heavy chain increased, and as a result, the quantity and type of product-related impurities that were expressed also changed which impacted the yield, product quality attributes of the desired protein, the downstream purification of the protein, and the robustness of the manufacturing process as a whole.

[0048] The imbalance in the ratio of the asymmetric heavy chains impacted the types of product-related impurities that were formed. It was found that excess production of the long heavy chain resulted in an increase in protein-related impurities comprising the long heavy chain, such as homodimers and monomers containing the long heavy chain. The unbalanced expression of the heavy chains and the need to remove the impurities formed due to the imbalance in expression, which was unexpectedly found to be difficult with certain long heavy chain containing impurities, impacted the yield and product quality attributes of asymmetric multispecific antibodies. As such, it is desirable to maintain a more balanced expression of the asymmetric heavy chain to maintain the desired and/or required product quality attributes, as well as reducing unnecessary time, resources, product loss and decrease in the robustness of the manufacturing process due to the excessive effort to recover the product from the undesired long heavy chain impurity.

[0049] Delaying production of a desired drug substance to switch cell lines or rescreen clones to identify new cell lines that are capable of reliably expressing the recombinant asymmetric multispecific antibody drug substance that conforms to desired product qualities and attributes, and is amenable to established facility practices and/or protocols, such as temperature shifts, is costly in terms of time, resources, manpower, and does not support an efficient and effective manufacturing process. Therefor use of temperature as a factor during selection of clonal cell lines expressing asymmetric multispecific antibodies would be beneficial for obtaining production cell lines that express the desired protein with the desired qualities and thereby reducing and/or eliminating the production of product-related impurities that impact the production of the desired protein.

[0050] It was found that temperature could be used as a lever during cell line development to select desirable cell line candidates expressing recombinant asymmetric multispecific antibodies that meet product quality as well as manufacturability requirements. Cell culture temperature has the potential to influence the product quality of asymmetric proteins, such as by altering the molar ratio of long heavy chain to short heavy chain which influenced the management of product-related impurities. It would be beneficial for a cell line development process to incorporate desired set point temperatures during the screening and selection processes that meet the requirements of not only the drug product attributes, but also desired facility practices and/or protocols. Clone screening using temperature as a lever is also beneficial as product quality attribute response to temperature appears to be molecule dependent and/or cell line dependent. Modulating product quality using temperature during screening and selection of clonal cell lines reduced selection of clonal cell lines that were more susceptible to expression of product-related impurities, improved product quality, and were more amenable to desired process practices.

[0051] The invention provides a method for selecting a cell line expressing an asymmetric multispecific antibody comprising the steps: establishing at least one clonally derived cell line expressing the asymmetric multispecific antibody; establishing at least two cell cultures from one or more of the clonally derived cell lines, wherein at least one cell culture from each cell line is cultured at a first temperature regime and at least one cell culture from each cell line is cultured at a second temperature regime; comparing the expression of at least one product-related impurity produced by the cells cultured at each temperature regime; and selecting a cell line that resulted in reduced expression of at least one product-related impurity. In one embodiment the selected cell line is then cultured at the temperature regime that resulted in reduced expression of at least one product-related impurity.

[0052] The invention provides a method for establishing a cell line from a clonally derived culture expressing an asymmetric multispecific antibody comprising the steps: transforming cells with at least one gene encoding an asymmetric multispecific antibody; isolating at least one single stably transformed cell expressing the asymmetric multispecific antibody and establishing a clonally derived culture; establishing at least two cell cultures from one or more clonally derived culture; culturing at least one cell culture from each clonally derived culture at a first temperature regime and culturing at least one cell culture from each clonally derived culture is cultured at a second temperature regime; comparing the molar ratio of long heavy chain to short heavy chain produced by the cells at each temperature regime; selecting at least one clonally derived culture that produced a lower molar ratio of long heavy chain to short heavy chain; and establishing a cell line from the clonally derived culture.

[0053] The invention provides a method for producing an isolated, purified, recombinant asymmetric multispecific antibody, the method comprising the steps: a) isolating at least one single stably transformed cell expressing the asymmetric multispecific antibody and establishing a clonally derived culture; b) establishing at least two cell cultures from one or more of the clonally derived cultures; c) culturing at least one cell culture from each clonally derived culture at a first temperature regime comprising a single temperature and culturing at least one cell culture from each clonally derived culture at a second temperature regime; d) comparing at least one related impurity comprising an unpaired or mis-paired long heavy chain produced by the cells cultured at each temperature regime; e) selecting the cell culture that modulated production of the product related impurity; f) establishing a cell line expressing the asymmetric multispecific antibody from the selected cell culture; g) inoculating a bioreactor with the cell line expressing the asymmetric multispecific antibody; h) culturing the cells to express the asymmetric multispecific antibody at the temperature that modulated the production of the product-related impurity; i) harvesting the recombinant asymmetric multispecific antibody from the cell culture; j) processing the recombinant asymmetric multispecific antibody through one or more chromatography unit operations; and k) obtaining an isolated, purified, recombinant asymmetric multispecific antibody.

[0054] The invention provides an isolated, purified, recombinant asymmetric multispecific antibodies according to the method described herein.

[0055] Cell lines suitable for production of recombinant asymmetric multispecific antibodies need to be stable with respect to product quality and productivity, without the expression or production, or increased expression or production, of undesirable product-related impurities. These cell lines must be capable of producing the desired asymmetric multispecific antibodies, with the same quality and attributes every time, over time.

[0056] Creation of stable cell lines begins with the transformation of a host cell that is suitable or desirable for recombinant production of the protein of interest. Typically, such cells are created, modified, and/or developed for production of recombinant proteins.

[0057] The cells may be derived from a multi-cellular animal. A commonly used animal cell line for biopharmaceutical production is a mammalian cell line. A wide variety of mammalian cell lines suitable for use are available from the American Type Culture Collection (Manassas, Va.) and commercial vendors. Commonly used cell lines include those from Chinese hamster ovary (CHO) cells, human embryonic kidney (HEK) cells, murine myeloma (NS0, Sp2/0) cells, baby hamster kidney (BHK) cells, human embryonic kidney (293) cells, fibrosarcoma (HT-1080) cells, human embryonic retinal (PER.C6) cells, hybrid kidney and B cells (HKB-11), CEVEC's amniocyte production (CAP) cells, human liver (HuH-7) cell, and any other cells that are used or suitable for use in clinical and/or commercial manufacturing.

[0058] The most commonly used cell lines are from Chinese hamster ovary (CHO) cells. CHO cells are widely used to produce complex recombinant proteins. The dihydrofolate reductase (DHFR)-deficient mutant cell lines (Urlaub et al. (1980), Proc Natl Acad Sci USA 77: 4216-4220), DXB11 and DG-44, are desirable CHO host cell lines because the efficient DHFR selectable and amplifiable gene expression system allows high level recombinant protein expression in these cells (Kaufman R. J. (1990). Meth Enzymol 185:537-566). The glutamine synthetase (GS)-knockout CHOK1SV cell lines, making use of glutamine synthetase (GS)-based methionine sulfoximine (MSX) selection are also widely used. Also included are CHOK1 cells (ATCC CCL61). In addition, these cells are easy to manipulate as adherent or suspension cultures and exhibit relatively good genetic stability. CHO cells and proteins recombinantly expressed by them have been extensively characterized and have been approved for use in clinical and commercial manufacturing by regulatory agencies.

[0059] The cells are transformed with an expression system(s), such as vectors comprising the gene(s) encoding the protein(s) of interest. Expression systems and constructs in the form of plasmids, expression vectors, transcription or expression cassettes that comprise at least one nucleic acid molecule encoding a protein of interest are also provided herein, as well host cells comprising such expression systems or constructs. As used herein, “vector” means any molecule or entity (e.g., nucleic acid, plasmid, bacteriophage, transposon, cosmid, chromosome, virus, virus capsid, virion, naked DNA, complexed DNA and the like) suitable for use to transfer and/or transport protein encoding information into a host cell and/or to a specific location and/or compartment within a host cell. Vectors can include viral and non-viral vectors, and non-episomal mammalian vectors. Vectors are often referred to as expression vectors, for example, recombinant expression vectors, or cloning vectors. The vector may be introduced into a host cell to allow replication of the vector itself and thereby amplify the copies of the polynucleotide contained therein. The cloning vectors may contain sequence components and generally include, without limitation, an origin of replication, promoter sequences, transcription initiation sequences, enhancer sequences, and selectable markers. These elements may be selected as appropriate by a person of ordinary skill in the art.

[0060] Transformation refers to a change in a cell's genetic characteristics. A cell has been transformed when it has been modified to contain new DNA or RNA. For example, a cell is transformed where it is genetically modified from its native state by introducing new genetic material via transfection, transduction, or other techniques. Transduction refers to the process whereby foreign DNA is introduced into a cell via viral vector. Transfection refers to the uptake of foreign or exogenous DNA by a cell. One or more vectors may be inserted into a suitable cell for amplification and/or polypeptide expression. The transformation of an expression vector into a selected cell may be accomplished by well-known methods including transfection, infection, calcium phosphate co-precipitation, electroporation, nucleofection, microinjection, DEAE-dextran mediated transfection, cationic lipids mediated delivery, liposome mediated transfection, microprojectile bombardment, receptor-mediated gene delivery, delivery mediated by polylysine, histone, chitosan, and peptides. The method selected will in part be a function of the type of host cell used. These methods and other suitable methods are well known to the skilled artisan.

[0061] Following transfection or transduction, the transforming DNA can recombine with that of the cell by physically integrating into a chromosome of the cell or can be maintained transiently as an episomal element without being replicated or can replicate independently as a plasmid. A cell is considered to have been “stably transformed” when the transforming DNA is replicated with the division of the cell. Following transfection, the viability of the cells typically decreases, and the unamplified pools are typically passaged multiple times to allow recovery. The pools are maintained as constant temperature cultures, typically a physiological temperature, such as 35° C.-37° C. typically 36° C.

[0062] The cells may be subjected to selective pressure to select those cells that have internalized the expression system. Selectable genes may be used to amplify the gene that will be expressed. Amplification is the process wherein genes that are required for production of a protein critical for growth or cell survival are reiterated in tandem within the chromosomes of successive generations of recombinant cells. Examples of suitable selectable markers for mammalian cells include glutamine synthetase (GS)/methionine sulfoximine (MSX) system, dihydrofolate reductase (DHFR), and promoterless thymidine kinase genes. Mammalian cell transformants are placed under selection pressure wherein only the transformants are uniquely adapted to survive by virtue of the selectable gene present in the vector. Selection pressure is imposed by culturing the transformed cells under conditions in which the concentration of selection agent in the medium is successively increased, thereby leading to the amplification of both the selectable gene and the DNA that encodes a protein of interest. As a result, increased quantities of a polypeptide of interest are synthesized from the amplified DNA.

[0063] Two common systems used with CHO cells are DHFR-deficient cells (examples include CHO-DXB11 and CHO-DG44) and CHO cells lacking glutamine synthetase (GS) such as CHOK1SV or other GS-knock out cells. DHFR-deficient cells use of selection media lacking thymidine and hypoxanthine results in the survival of cells with sufficient exogenously integrated DHFR gene copies into the cells. Likewise, for cells lacking GS, use of selection media supplemented with L-glutamic acid instead of L-glutamine results in survival of cells having sufficient GS integrated into the cell genome.

[0064] Cell lines for commercial scale production of recombinant protein drug substance are derived from a single cell progenitor. These clonally derived cultures must be individually propagated and assessed for growth, productivity, and secreted protein product quality. Stable clonal cell lines are used to establish master cell banks for stockpiling the single cell progenitor clones expressing desired recombinant protein. Cells from the master cell bank are then used to create working cell banks that supply the cells that will be used for production. Single cell cloning is performed by aliquoting the amplified or unamplified cells into multi-well vessels, such as 96 well plates, which are maintained in a constant temperature culture, typically a physiological temperature such as 35° C.-37° C. typically 36° C.

[0065] Technologies are available to assist with single cell isolation from a population. These include, but are not limited to limiting dilution plating, microfluidic encapsulation, FACS-assisted cell sorting, colony picking in semi-solid media, single-cell printers, microfluidic wells or chips, including optifluidic technology, (Berkley Lights, Emeryville. CA). Only those colonies arising from a single cell are selected for further processing.

[0066] The stable pools generated during CLD workflow comprise a heterogeneous mix of cells which differ in the number and localization of integrated transgenes, have unique genetic and phenotypic characteristics, and/or are divergent in cell-specific productivity. These stably transfected pools are used for single cell cloning to generate clonally derived cultures that are subsequently screened for performance to identify those that have the desired qualities and characteristics, such as expression, productivity, growth, and/or other product quality attributes, including product-related impurity production. The transgene copy number can also be amplified using an inhibitor to the selection marker which the cells need to survive. This increases the copy number of the selection marker genes as well as transgenes integrated in the adjacent loci. In one embodiment the clonally derived culture may be further selected for desired expression, productivity, growth, and/or other desired product quality attributes of the expressed asymmetric multispecific antibody.

[0067] The clones are then scaled up using vessels with increasing size and are still maintained in a constant physiological temperature culture, 35° C.-37° C. typically 36° C. The vessels can include multi-well plates, for example, 96 well plates, 24 well plates, 6 well plates.

[0068] Once the cells have reached a desired cell number or density, clones are evaluated and ranked under conditions that mimic production conditions and are assessed for production and product qualities for the first time. The clones are transferred to suitable vessels, such as deep well plates, spin tubes, and/or agitated shake flasks, and are grown in suspension in a fed batch culture, incubated at a constant physiological temperature of 35° C.-37° C. typically 36° C. This is typically a 10-day process, with feeding and monitoring of culture conditions (e.g., pH, osmolality, lactate/glucose, etc.) every 2-3 days. Typically, at least 100 or more clones are screened. The ranking of pools and clones considers titer, specific productivity (qP), growth, viability, and product quality (PQ) profile, and the like. The specific product qualities that are used for the selection usually depend on the modality of the expressed protein and the qualities desired and/or required in the final drug product and/or during the production of the drug substance. These can include aggregate levels, charge distribution, clips, partial species, and post translational modifications. The top clones, typically 10 or less, are selected for further development.

[0069] The top clone candidates are typically cultured in small scale bioreactors (typically 3 L or 7 L) under some/all conditions that will be used during large scale production. For example, if one or more temperature shifts could occur during large scale production, these temperatures set points are incorporated during the small-scale bioreactor runs. This process is typically a 10-25 or more day process. In some embodiments the process is 15-20 days. In some embodiments the process is at least 15 days. The clones are again assessed and ranked based on productivity, growth, product quality attributes, and the like.

[0070] When this process was used to screen and select clonal cells expressing asymmetric multispecific antibodies it was observed that the product quality attributes of the proteins expressed by the clonal cells that were screened and selected at a constant physiological temperature (36° C.) changed when the cells were subjected to cell culture conditions that included a temperature shift (36° C. to 34° C. or 36° C. to 32.5° C.). Exposure to the lower culture temperatures resulted in an increase in the molar ratio of long heavy chain to short heavy chain. It is possible that the transcription of both the long and short heavy chains continues at the lower temperatures but at different rates, resulting in the skewed molar ratios observed. The shift in the ratio of the heavy chains impacted the type of product-related impurities that were formed, and these impurities impacted the product yield and activity, as well as the efficiency of the downstream purification operations.

[0071] The product quality of these asymmetric multispecific antibodies was influenced by the temperature during cell culture. To better understand this result, clones expressing asymmetric multispecific antibodies were exposed to one or more temperature set points during the initial screen and selection of clones based on product quality attributes. When temperature was included as a factor in the screening and selection of the clones it was possible to identify those clones that were able to maintain a more balanced molar ratio of long heavy chain to short heavy chain at different temperature set points. As such, the composition of the product related impurities changed, which improved downstream purification and improved the yield of the desired product, as well contributing to a more robust manufacturing process.

[0072] Temperature regime refers to the temperature(s) or temperature set points employed during cell culture. One or more temperature regimes may be used over the course of a cell culture operation. Most recombinant therapeutic proteins expressed by mammalian host cells. For encourage optimal growth of the cells, mammalian cell cultures are typically maintained at temperatures of 36° C. to 37° C. To increase production efficiency of the desired recombinant protein, less than optimal cell growth conditions may be desired to promote enhanced production. A lower culture temperature(s) may be used to slow or stop cell growth and to promote production of the desired recombinant antibody. Use of temperature shifts from growth phase optimal temperatures to production phase optimal temperatures are often employed in cell culture strategies. The growth phase may be conducted at a first temperature from about 28° C. to about 37° C., typically 36° C. to 37° C., and a production phase may conducted at a second temperature from about 28° C. to about 37° C., typically from about 30° C. to about 35° C., or from about 30° C. to about 34° C., preferably 32.5° C.

[0073] This modulation of temperature can be used throughout the duration of the cell culture to achieve the desired production objectives. Combinations of temperature shifts may also be used to go from a first growth phase, to a first production phase, to second growth phase, followed by a second production phase, and so on.

[0074] The invention provides for two or more temperature regimes. One embodiment of the invention comprises one or more single temperature regimes. In a single temperature regime, the culture is held at a single temperature for the duration of the culture. In one embodiment the temperature is from about 37° C. to about 28° C. In one embodiment the temperature is from about 36° C. to about 28° C. In one embodiment the temperature is from about 37° C. to about 29° C. In one embodiment the temperature is from about 36° C. to about 29° C. In one embodiment the temperature is from about 37° C. to about 30° C. In one embodiment the temperature is from about 36° C. to about 30° C. In one embodiment the temperature is from about 37° C. to about 31° C. In one embodiment the temperature is from about 36° C. to about 31° C. In one embodiment the temperature is from about 36° C. to about 31° C. In one embodiment the temperature is from about 37° C. to about 32° C. In one embodiment the temperature is from about 37° C. to about 32.5° C. In one embodiment the temperature is from about 36° C. to about 32° C. In one embodiment the temperature is from about 36° C. to about 32.5° C. In one embodiment the temperature is from about 37° C. to about 33° C. In one embodiment the temperature is from about 36° C. to about 33° C. In one embodiment the temperature is from about 37° C. to about 34° C. In one embodiment the temperature is from about 36° C. to about 34° C. In one embodiment the temperature is from about 37° C. to about 35° C. In one embodiment the temperature is from about 36° C. to about 35° C. In one embodiment the temperature is from about 37° C. to about 36° C. In one embodiment the temperature is from about 35° C. to about 28° C. In one embodiment the temperature is from about 35° C. to about 29° C. In one embodiment the temperature is from about 35° C. to about 30° C. In one embodiment the temperature is from about 35° C. to about 31° C. In one embodiment the temperature is from about 35° C. to about 32° C. In one embodiment the temperature is from about 35° C. to about 33° C. In one embodiment the temperature is from about 35° C. to about 34° C. In one embodiment the temperature is from about 34° C. to about 28° C. In one embodiment the temperature is from about 34° C. to about 29° C. In one embodiment the temperature is from about 34° C. to about 30° C. In one embodiment the temperature is from about 34° C. to about 31° C. In one embodiment the temperature is from about 34° C. to about 33° C. In one embodiment the temperature is from about 34° C. to about 28° C. In one embodiment the temperature is from about 33° C. to about 28° C. In one embodiment the temperature is from about 33° C. to about 29° C. In one embodiment the temperature is from about 33° C. to about 30° C. In one embodiment the temperature is from about 33° C. to about 31° C. In one embodiment the temperature is from about 33° C. to about 32° C. In one embodiment the temperature is from about 32° C. to about 28° C. In one embodiment the temperature is from about 32° C. to about 29° C. In one embodiment the temperature is from about 32° C. to about 30° C. In one embodiment the temperature is from about 32° C. to about 31° C. In one embodiment the temperature is from about 31° C. to about 28° C. In one embodiment the temperature is from about 31° C. to about 29° C. In one embodiment the temperature is from about 31° C. to about 30° C. In one embodiment the temperature is from about 30° C. to about 28° C. In one embodiment the temperature is from about 30° C. to about 29° C. In one embodiment the temperature is 28° C., 29°C., 30° C., 31° C., 32° C., 33° C., 34° C., 35° C., 36° C. or 37° C. In one embodiment the temperature is 32.5° C.

[0075] One embodiment of the invention comprises one or more temperature regimes comprising at least one temperature shift. In one embodiment the temperature shift is from a first temperature to a second temperature that is higher or lower than the first temperature. In one embodiment the first temperature is from about 37° C. to about 28° C. In one embodiment the first temperature is from about 36° C. to about 28° C. In one embodiment the first temperature is from about 37° C. to about 29° C. In one embodiment the first temperature is from about 36° C. to about 29° C. In one embodiment the first temperature is from about 37° C. to about 30° C. In one embodiment the first temperature is from about 36° C. to about 30° C. In one embodiment the first temperature is from about 37° C. to about 31° C. In one embodiment the first temperature is from about 36° C. to about 31° C. In one embodiment the first temperature is from about 36° C. to about 31° C. In one embodiment the first temperature is from about 37° C. to about 32° C. In one embodiment the first temperature is from about 37° C. to about 32.5° C. In one embodiment the first temperature is from about 36° C. to about 32° C. In one embodiment the first temperature is from about 36° C. to about 32.5° C. In one embodiment the first temperature is from about 37° C. to about 33° C. In one embodiment the first temperature is from about 36° C. to about 33° C. In one embodiment the first temperature is from about 37° C. to about 34° C. In one embodiment the first temperature is from about 36° C. to about 34° C. In one embodiment the first temperature is from about 37° C. to about 35° C. In one embodiment the first temperature is from about 36° C. to about 35° C. In one embodiment the first temperature is from about 35° C. to about 28° C. In one embodiment the first temperature is from about 35° C. to about 29° C. In one embodiment the first temperature is from about 35° C. to about 30° C. In one embodiment the first temperature is from about 35° C. to about 31° C. In one embodiment the first temperature is from about 35° C. to about 32° C. In one embodiment the first temperature is from about 35° C. to about 32.5° C. In one embodiment the first temperature is from about 35° C. to about 33° C. In one embodiment the first temperature is from about 35° C. to about 34° C. In one embodiment the first temperature is from about 34° C. to about 28° C. In one embodiment the first temperature is from about 34° C. to about 29° C. In one embodiment the first temperature is from about 34° C. to about 30° C. In one embodiment the first temperature is from about 34° C. to about 31° C. In one embodiment the first temperature is from about 34° C. to about 32° C. In one embodiment the first temperature is from about 34° C. to about 32.5° C. In one embodiment the first temperature is from about 34° C. to about 28° C. In one embodiment the first temperature is from about 33° C. to about 28° C. In one embodiment the first temperature is from about 33° C. to about 29° C. In one embodiment the first temperature is from about 33° C. to about 30° C. In one embodiment the first temperature is from about 33° C. to about 31° C. In one embodiment the first temperature is from about 33° C. to about 32° C. In one embodiment the first temperature is from about 33° C. to about 32.5° C. In one embodiment the first temperature is from about 32° C. to about 28° C. In one embodiment the first temperature is from about 32° C. to about 29° C. In one embodiment the first temperature is from about 32° C. to about 30° C. In one embodiment the first temperature is from about 32.5° C. to about 28° C. In one embodiment the first temperature is from about 32.5° C. to about 29° C. In one embodiment the first temperature is from about 32.5° C. to about 30° C. In one embodiment the first temperature is from about 32.5° C. to about 31° C. In one embodiment the first temperature is from about 32.5° C. to about 32° C. In one embodiment the first temperature is from about 32.5° C. to about 33° C. In one embodiment the first temperature is from about 32.5° C. to about 34° C. In one embodiment the first temperature is from about 32.5° C. to about 35° C. In one embodiment the first temperature is from about 31° C. to about 28° C. In one embodiment the first temperature is from about 31° C. to about 29° C. In one embodiment the first temperature is from about 31° C. to about 30° C. In one embodiment the first temperature is from about 30° C. to about 28° C. In one embodiment the first temperature is from about 30° C. to about 29° C. In one embodiment the first temperature is 28° C., 29° C., 30° C., 31° C., 32° C., 33° C., 34° C., 35° C., 36° C. or 37° C. In one embodiment the first temperature is 32.5° C.

[0076] In one embodiment the second temperature is about 1° C. to 9° C. lower than the first temperature. In one embodiment the second temperature is about 2° C. to 9° C. lower than the first temperature. In one embodiment the second temperature is about 3° C. to 9° C. lower than the first temperature. In one embodiment the second temperature is about 4° C. to 9° C. lower than the first temperature. In one embodiment the second temperature is about 5° C. to 9° C. lower than the first temperature. In one embodiment the second temperature is about 6° C. to 9° C. lower than the first temperature. In one embodiment the second temperature is about 7° C. to 9° C. lower than the first temperature. In one embodiment the second temperature is about 8° C. to 9° C. lower than the first temperature. In one embodiment the second temperature is about 1° C. to 8° C. lower than the first temperature. In one embodiment the second temperature is about 2° C. to 8° C. lower than the first temperature. In one embodiment the second temperature is about 3° C. to 8° C. lower than the first temperature. In one embodiment the second temperature is about 4° C. to 8° C. lower than the first temperature. In one embodiment the second temperature is about 5° C. to 8° C. lower than the first temperature. In one embodiment the second temperature is about 6° C. to 8° C. lower than the first temperature. In one embodiment the second temperature is about 7° C. to 8° C. lower than the first temperature. In one embodiment the second temperature is about 1° C. to 7° C. lower than the first temperature. In one embodiment the second temperature is about 2° C. to 7° C. lower than the first temperature. In one embodiment the second temperature is about 3° C. to 7° C. lower than the first temperature. In one embodiment the second temperature is about 4° C. to 7° C. lower than the first temperature.

[0077] In one embodiment the second temperature is about 5° C. to 7° C. lower than the first temperature. In one embodiment the second temperature is about 6° C. to 7° C. lower than the first temperature. In one embodiment the second temperature is about 1° C. to 6° C. lower than the first temperature. In one embodiment the second temperature is about 2° C. to 6° C. lower than the first temperature. In one embodiment the second temperature is about 3° C. to 6° C. lower than the first temperature. In one embodiment the second temperature is about 4° C. to 6° C. lower than the first temperature. In one embodiment the second temperature is about 5° C. to 6° C. lower than the first temperature. In one embodiment the second temperature is about 1° C. to 5° C. lower than the first temperature. In one embodiment the second temperature is about 2° C. to 5° C. lower than the first temperature. In one embodiment the second temperature is about 3° C. to 5° C. lower than the first temperature. In one embodiment the second temperature is about 4° C. to 5° C. lower than the first temperature. In one embodiment the second temperature is about 1° C. to 4° C. lower than the first temperature. In one embodiment the second temperature is about 2° C. to 4° C. lower than the first temperature. In one embodiment the second temperature is about 3° C. to 4° C. lower than the first temperature. In one embodiment the second temperature is about 1° C. to 3° C. lower than the first temperature. In one embodiment the second temperature is about 2° C. to 3° C. lower than the first temperature. In one embodiment the second temperature is about 2.5° C. to 3.5° C. lower than the first temperature. In one embodiment the second temperature is about 1° C. to 2° C. lower than the first temperature.

[0078] In one embodiment the second temperature is from about 37° C. to about 28° C. In one embodiment the second temperature is from about 36° C. to about 28° C. In one embodiment the second temperature is from about 37° C. to about 29° C. In one embodiment the second temperature is from about 36° C. to about 29° C. In one embodiment the second temperature is from about 37° C. to about 30° C. In one embodiment the second temperature is from about 36° C. to about 30° C. In one embodiment the second temperature is from about 37° C. to about 31° C. In one embodiment the second temperature is from about 36° C. to about 31° C. In one embodiment the second temperature is from about 36° C. to about 31° C. In one embodiment the second temperature is from about 37° C. to about 32° C. In one embodiment the second temperature is from about 37° C. to about 32.5° C. In one embodiment the second temperature is from about 36° C. to about 32° C. In one embodiment the second temperature is from about 36° C. to about 32.5° C. In one embodiment the second temperature is from about 37° C. to about 33° C. In one embodiment the second temperature is from about 36° C. to about 33° C. In one embodiment the second temperature is from about 37° C. to about 34° C. In one embodiment the second temperature is from about 36° C. to about 34° C. In one embodiment the second temperature is from about 37° C. to about 35° C. In one embodiment the second temperature is from about 36° C. to about 35° C. In one embodiment the second temperature is from about 35° C. to about 28° C. In one embodiment the second temperature is from about 35° C. to about 29° C. In one embodiment the second temperature is from about 35° C. to about 30° C. In one embodiment the second temperature is from about 35° C. to about 31° C. In one embodiment the second temperature is from about 35° C. to about 32° C. In one embodiment the second temperature is from about 35° C. to about 32.5° C. In one embodiment the second temperature is from about 35° C. to about 33° C. In one embodiment the second temperature is from about 35° C. to about 34° C. In one embodiment the second temperature is from about 34° C. to about 28° C. In one embodiment the second temperature is from about 34° C. to about 29° C. In one embodiment the second temperature is from about 34° C. to about 30° C. In one embodiment the second temperature is from about 34° C. to about 31° C. In one embodiment the second temperature is from about 34∪ C. to about 32° C. In one embodiment the second temperature is from about 34° C. to about 32.5° C. In one embodiment the second temperature is from about 34° C. to about 28° C. In one embodiment the second temperature is from about 33°0 C. to about 28° C. In one embodiment the second temperature is from about 33° C. to about 29° C. In one embodiment the second temperature is from about 33° C. to about 30° C. In one embodiment the second temperature is from about 33° C. to about 31° C. In one embodiment the second temperature is from about 33° C. to about 32° C. In one embodiment the second temperature is from about 33° C. to about 32.5° C. In one embodiment the second temperature is from about 32° C. to about 28° C. In one embodiment the second temperature is from about 32° C. to about 29° C. In one embodiment the second temperature is from about 32° C. to about 30° C. In one embodiment the second temperature is from about 32.5° C. to about 28° C. In one embodiment the second temperature is from about 32.5° C. to about 29° C. In one embodiment the second temperature is from about 32.5° C. to about 30° C. In one embodiment the second temperature is from about 32.5° C. to about 31° C. In one embodiment the second temperature is from about 31° C. to about 28° C. In one embodiment the second temperature is from about 31° C. to about 29° C. In one embodiment the second temperature is from about 31° C. to about 30° C. In one embodiment the second temperature is from about 30° C. to about 28° C. In one embodiment the second temperature is from about 30° C. to about 29° C. In one embodiment the second temperature is 28° C., 29° C., 30° C., 31° C., 32° C., 33° C., 34° C., 35° C., 36° C. or 37° C. In one embodiment the second temperature is 32.5° C.

[0079] In one embodiment the first temperature regime is a single temperature from 36° C. to 37° C. and the second temperature regime comprises at least one temperature shift from a first temperature of 36° C. to 37° C. to a second temperature of 28° C. to 35° C.

[0080] “Asymmetric multispecific antibody” include asymmetric proteins that are recombinantly engineered to bind, neutralize, and/or interact specifically with at least two different antigens or targets, or at least two different epitopes on the same antigen or target. In one embodiment, asymmetric multispecific antibodies can be engineered to target immune effectors, to stimulate or trigger immune responses, to carry cytotoxic agents to tumors or infectious agents. These asymmetric multispecific antibodies have been found useful for a variety of applications such as in cancer immunotherapy by redirecting immune effector cells to tumor cells, modifying cell signaling by blocking signaling pathways, targeting tumor angiogenesis, blocking cytokines, and as pre-targeted delivery vehicles for drugs, such as delivery of chemotherapeutic agents, radiolabels (to improve detection sensitivity) and nanoparticles (directed to specific cells/tissues, such as cancer cells).

[0081] The asymmetric multispecific antibodies can be of scientific and/or commercial interest. Asymmetric multispecific antibodies can be produced in various ways, most commonly by recombinant animal cell lines using cell culture methods. The asymmetric multispecific antibodies may be produced intracellularly or secreted into the culture medium from which it can be recovered and/or collected and may be referred to as “recombinant asymmetric multispecific antibodies”. The term “isolated recombinant asymmetric multispecific antibodies” refer to an asymmetric multispecific antibodies that that have been purified away from proteins, polypeptides. DNA, and/or other contaminants or impurities that would interfere with its therapeutic, diagnostic, prophylactic, research, or other use. Asymmetric multispecific antibodies of interest include, among others, those that exert a therapeutic effect by binding two or more targets, particularly targets among those listed herein, including targets derived therefrom, targets related thereto, and modifications thereof. Asymmetric multispecific antibodies may have two or more heavy chains that differ in length from each other, for example, having a long heavy chain and a short heavy chain. In a related embodiment, the asymmetric multispecific antibody is an asymmetric bispecific antibody. Various bispecific antibody formats that include asymmetric bispecific antibodies are known in the art (Spiess et al., Mol Immunol 67, 95-106, 2015; Sedykh et al., Drug Design, Development and Therapy 18(12), 195-208, 2018; Fan et al., J Hematol & Oncology 8:130-143, 2015;); Williams et al., Chapter 41 Process Design for Bispecific Antibodies in Biopharmaceutical Processing Development, Design and Implementation of Manufacturing Processes, Jagschies et al., eds., 2018, pages 837-855; Seimetz et al., Cancer Treat Rev 36(6) 458-67, 2010; Shulka and Norman, Chapter 26 Downstream Processing of Fc Fusion Proteins, Bispecific Antibodies, and Antibody-Drug Conjugates, in Process Scale Purification of Antibodies Second Edition, Uwe Gottswchalk editor, p 559-594, John Wiley & Sons, 2017; Moore et al., MAbs 3:6, 546-557, 2011.

[0082] Asymmetrical multispecific antibodies also include those having an odd number of active components having unique peptide and/or protein sequences that collectively result in an asymmetrical multispecific antibody with specificity for two or more targets. Antibodies include human, humanized, chimeric, multi-specific, monoclonal, polyclonal, bispecific, and oligomers or antigen binding fragments thereof. Antibodies also include both glycosylated and non-glycosylated immunoglobulins of any isotype or subclass, such as lgG1-, lgG2-lgG3- or lgG4-type. Also included are antibodies having an antigen binding fragment or region, particularly antibody antigen binding fragments that compete with the intact antibody for specific binding. Also included are peptibodies, antibody derivatives, antibody analogs, fusion proteins (and proteins made using Xmab® technology, bispecific T cell engagers having extensions, such as half-life extensions, for example BiTE® molecules.

[0083] Also included are modified asymmetric multispecific antibodies, such as antibodies modified chemically by a non-covalent bond, covalent bond, or both a covalent and non-covalent bond. Also included are antibodies further comprising one or more post-translational modifications which may be made by cellular modification systems or modifications introduced ex vivo by enzymatic and/or chemical methods or introduced in other ways. In particular, antibodies modified using such methods to attach one or more proteins of interest to the antibody.

[0084] In some embodiments, asymmetric multispecific antibodies bind, neutralize and/or interact specifically to one or more CD proteins. HER receptor family proteins, cell adhesion molecules, growth factors, nerve growth factors, fibroblast growth factors, transforming growth factors (TGF), insulin-like growth factors, osteoinductive factors, insulin and insulin-related proteins, coagulation and coagulation-related proteins, colony stimulating factors (CSFs), other blood and serum proteins blood group antigens; receptors, receptor-associated proteins, growth hormones, growth hormone receptors, T-cell receptors; neurotrophic factors, neurotrophins, relaxins, interferons, interleukins, viral antigens, lipoproteins, integrins, rheumatoid factors, immunotoxins, surface membrane proteins, transport proteins, homing receptors, addressins, regulatory proteins, and immunoadhesins.

[0085] In some embodiments asymmetric multispecific antibodies bind, neutralize and/or interact with one or more of the following, alone or in any combination: CD proteins including but not limited to CD3, CD4, CD5, CD7, CD8, CD19, CD20, CD22, CD25, CD30, CD33, CD34, CD38, CD40, CD70, CD123, CD133, CD138, CD17,. and CD174, HER receptor family proteins, including, for instance, HER2, HER3, HER4, and the EGF receptor, EGFRvIII, cell adhesion molecules, for example, LFA-1, Mol, p 150, 95, VLA-4, ICAM-1, VCAM, and alpha v/beta 3 integrin, growth factors, including but not limited to, for example, vascular endothelial growth factor (“VEGF”); VEGFR2, growth hormone, thyroid stimulating hormone, follicle stimulating hormone, luteinizing hormone, growth hormone releasing factor, parathyroid hormone, mullerian-inhibiting substance, human macrophage inflammatory protein (MIP-1-alpha), erythropoictin (EPO), nerve growth factor, such as NGF-beta, platelet-derived growth factor (PDGF), fibroblast growth factors, including, for instance, aFGF and bFGF, epidermal growth factor (EGF), Cripto, transforming growth factors (TGF), including, among others, TGF-α and TGF-β, including TGF-β1, TGF-β2, TGF-β3, TGF-β4, or TGF-β5, insulin-like growth factors-I and -II (IGF-I and IGF-II), des(1-3)-IGF-I (brain IGF-I), and osteoinductive factors, insulins and insulin-related proteins, including but not limited to insulin, insulin A-chain, insulin B-chain, proinsulin, and insulin-like growth factor binding proteins; (coagulation and coagulation-related proteins, such as, among others, factor VIII, tissue factor, von Willebrand factor, protein C, alpha-1-antitrypsin, plasminogen activators, such as urokinase and tissue plasminogen activator (“t-PA”), bombazine, thrombin, thrombopoietin, and thrombopoietin receptor, colony stimulating factors (CSFs), including the following, among others, M-CSF, GM-CSF, and G-CSF, other blood and serum proteins, including but not limited to albumin, IgE, and blood group antigens, receptors and receptor-associated proteins, including, for example, flk2/flt3 receptor, obesity (OB) receptor, growth hormone receptors, and T-cell receptors; neurotrophic factors, including but not limited to, bone-derived neurotrophic factor (BDNF) and neurotrophin-3, -4, -5, or -6 (NT-3, NT-4, NT-5, or NT-6); relaxin A-chain, relaxin B-chain, and prorelaxin, interferon, including for example, interferon-alpha, -beta, and -gamma, interleukins (ILs), e.g., IL-1 to IL-10, IL-12, IL-15, IL-17, IL-23, IL-12/IL-23, IL-2Ra, IL1-R1, IL-6 receptor, IL-4 receptor and/or IL-13 to the receptor, IL-13RA2, or IL-17 receptor, IL-1RAP, viral antigens, including but not limited to, an AIDS envelope viral antigen, lipoproteins, calcitonin, glucagon, atrial natriuretic factor, lung surfactant, tumor necrosis factor-alpha and -beta, enkephalinase, BCMA, IgKappa, ROR-1, ERBB2, mesothelin, RANTES (regulated on activation normally T-cell expressed and secreted). mouse gonadotropin-associated peptide, Dnase, FR-alpha, inhibin, and activin, integrin, protein A or D, rheumatoid factors, immunotoxins, bone morphogenetic protein (BMP), superoxide dismutase, surface membrane proteins, decay accelerating factor (DAF), AIDS envelope, transport proteins, homing receptors, MIC (MIC-a, MIC-B), ULBP 1-6, EPCAM, addressins, regulatory proteins, immunoadhesins, antigen-binding proteins, somatropin, CTGF, CTLA4, cotaxin-1, MUC1, CEA, c-MET, Claudin-18, GPC-3, EPHA2, FPA, LMP1, MG7, NY-ESO-1, PSCA, ganglioside GD2, glanglioside GM2, BAFF, OPGL (RANKL), myostatin, Dickkopf-1 (DKK-1), Ang2, NGF, IGF-1 receptor, hepatocyte growth factor (HGF), TRAIL-R2, c-Kit, B7RP-1, PSMA, NKG2D-1, programmed cell death protein 1 and ligand, PD1 and PDL1, mannose receptor/hCGβ, hepatitis-C virus, mesothelin dsFv[PE38 conjugate, Legionella pneumophila (lly), IFN gamma, interferon gamma induced protein 10 (IP10), IFNAR, TALL-1, TNFα, TL1A, thymic stromal lymphopoietin (TSLP), proprotein convertase subtilisin/Kexin Type 9 (PCSK9), stem cell factors, Flt-3, calcitonin gene-related peptide (CGRP), OX40L, α4β7, platelet specific (platelet glycoprotein Iib/IIIb (PAC-1), transforming growth factor beta (TFGβ), STEAP1, Zona pellucida sperm-binding protein 3 (ZP-3), TWEAK, platelet derived growth factor receptor alpha (PDGFRα), sclerostin, and biologically active fragments or variants of any of the foregoing. In some embodiments the asymmetric multispecific antibody comprises a mutein attached to an antibody or immunoglobulin, for example the IL-2 variant immunocytokine. Examples are CEA-IL-2v, (cergutuzumab amunaleukin), where an IL-2v moiety is fused to one heavy chain of the Fc part of the antibody, Schneider et al., 2019. Biotechnology Bioengineering 116:2503-2513; and Anti-FAP-IL-2 (fibroblast activation protein (FAP) targeted interleukin-2 variant (IL-2v), Soerensen M M, et al. Safety, PK/PD, and anti-tumor activity of RO6874281. an engineered variant of interleukin-2 (IL-2v) targeted to tumor-associated fibroblasts via binding to fibroblast activation protein (FAP), Nicolini V. et al. Combining CEA-IL2v and FAP-IL2v immunocytokines with PD-L1 checkpoint blockade. Annual Meeting of the American Association for Cancer Research; New Orleans: 2016.

[0086] In some aspects the asymmetric multispecific antibody is a bifunctional fusion protein. In some aspects the bifunctional fusion protein comprises an IL-21 mutein. In some aspects the bifunctional fusion protein comprises a conjugate of an IL-21 mutein linked to the C-terminus of one of the two antibody heavy chains of an anti-PD-1 antibody. The IL-21-anti-PD-1 conjugate comprises a “short heavy chain” (an anti-PD1 heavy chain) and a “long heavy chain” (an anti-PD1 heavy chain linked to the IL-21 mutein). Such antibodies arc described in WO2019/028316, incorporated by reference in its entirety.

[0087] Interleukin-21 (IL-21) is a cytokine expressed by T cells, B cells, NK cells and myeloid cells, and regulates the activity of both innate and adaptive immune cells and improves T cell survival and effector function. IL-21 has a four-helix bundle structure and exists as a monomer. In some embodiments the asymmetric proteins comprise IL-21 muteins comprising at least one amino acid substitution, relative to the wild-type IL-21 amino acid sequence, which is provided herein as SEQ ID NO: 1. In exemplary aspects, the IL-21 mutein comprises an amino acid sequence of SEQ ID NO: 2, wherein X is any amino acid, and wherein the IL-21 mutein amino acid sequence differs from the amino acid sequence of human IL-21 (SEQ ID NO: 1) by at least 1 amino acid. In various aspects, the IL-21 mutein comprises an amino acid sequence which differs from the amino acid sequence of human IL-21 (SEQ ID NO: 1) by 3, 4, 5, 6 or 7 amino acids. In various aspects, the IL-21 mutein comprises an amino acid sequence which differs from the amino acid sequence of human IL-21 (SEQ ID NO: 1) by 1 or 2 amino acids. In exemplary aspects, the IL-21 mutein comprises an amino acid substitution with an amino acid at the position according to Table 1.

TABLE 1
Amino acid substitutions

| Amino Acid | |
|---|---|
| position of | Amino Acid |
| SEQ ID NO: 1 | (in single letter code) |
| 5 | A, D, E, G, H, I, K, L, M, N, Q, |
| | S, T, V, or Y |
| 8 | A, D, E, N, S, T, V, or Y |
| 9 | A, D, E, G, H, I, K, L, M, N, Q, |
| | S, T, V, or Y |
| 11 | D or S |
| 12 | A, D, E, N, S, T, or V |
| 13 | D |
| 14 | A, D, or S |
| 15 | A, E, I, M, N, Q, S, T, or V |
| 16 | D or E |
| 19 | D |
| 23 | D |
| 65 | D, G, or P |
| 66 | D, G, or P |
| 68 | Q |
| 69 | D, G, or P |
| 70 | E, G, P, or Y |
| 71 | L |
| 72 | D, G, or P |
| 73 | A, D, E, G, H, I, N, P, Q, S, or V |
| 75 | D, G, or P |
| 76 | A, D, E, G, H, I, K, L, M, N, P, |
| | Q, S, T, V, or Y |
| 77 | D, G, or P |
| 78 | D |
| 79 | D |
| 80 | G, or P |
| 109 | K |
| 110 | D |
| 112 | D |
| 113 | K |
| 116 | A, D, E, I, K, L, M, N, S, T, or V |
| 117 | D |
| 119 | A, D, E, M, N, Q, S, or T |
| 120 | D |
| 123 | D |

[0088] In various aspects, the asymmetric multispecific antibody comprises an IL-21 mutein comprising one amino acid substitution relative to SEQ ID NO: 1 and optionally comprises one of SEQ ID NOs: 3-198, 249-254, and 283. In some embodiments the asymmetric multispecific antibody comprises an IL-21 mutein comprising two amino acid substitutions relative to SEQ ID NO: 1 and optionally comprising one of SEQ ID NOs: 199-248, and 255. In some embodiments the asymmetric multispecific antibody comprises an IL-21 mutein comprising amino acid substitutions at any two of positions 5, 9, 73, and 76 of SEQ ID NO: 1. In one embodiment amino acid substitutions are selected from: A, E, or Q at position 5, E or A at position 9, A or Q at position 73, and A, D, or E, at position 76. In one embodiment, the amino acid substitutions are at positions 5 and 73 of SEQ ID NO: 1. In one embodiment, the amino acid substitutions are at positions 5 and 76 of SEQ ID NO: 1. In one embodiment, the amino acid substitutions are at positions 9 and 73 of SEQ ID NO: 1. In one embodiment, the amino acid substitutions are at positions 9 and 76 of SEQ ID NO:1. In one embodiment the IL-21 mutein comprises the amino acid sequence of any of SEQ ID NOs: 233-245. In one embodiment, a single IL-21 mutein of SEQ ID NO: 233, 234, 235, 236, 237, 238, 239, 240, 241, 242, 243, 244, or 245 is attached to the Fc of the anti-PD-1 antibody. In one embodiment, a single IL-21 mutein of SEQ ID NO: 233, 234, 235, 236, 237, 238, 239, 240, 241, 242, 243, 244, or 245 is attached to the Fc of the anti-PD-1 antibody. In one embodiment the IL-21 mutein comprises the amino acid sequence of SEQ ID NO: 233. In one embodiment the IL-21 mutein comprises the amino acid sequence of SEQ ID NO: 234. In one embodiment the IL-21 mutein comprises the amino acid sequence of SEQ ID NO: 235. In one embodiment the IL-21 mutein comprises the amino acid sequence of SEQ ID NO: 236. In one embodiment the IL-21 mutein comprises the amino acid sequence of SEQ ID NO: 237. In one embodiment the IL-21 mutein comprises the amino acid sequence of SEQ ID NO: 238. In one embodiment the IL-21 mutein comprises the amino acid sequence of SEQ ID NO: 239. In one embodiment the IL-21 mutein comprises the amino acid sequence of SEQ ID NO: 240. In one embodiment the IL-21 mutein comprises the amino acid sequence of SEQ ID NO: 241. In one embodiment the IL-21 mutein comprises the amino acid sequence of SEQ ID NO: 242. In one embodiment the IL-21 mutein comprises the amino acid sequence of SEQ ID NO: 243. In one embodiment the IL-21mutein comprises the amino acid sequence of SEQ ID NO: 244. In one embodiment the IL-21 mutein comprises the amino acid sequence of SEQ ID NO: 245.

[0089] In some embodiments the asymmetric multispecific antibody comprises a conjugate of a mutein and an antibody or immunoglobulin. In some embodiments the conjugate comprises an IL-21 mutein. In some embodiments the conjugate comprises an IL-21 mutein attached to an antibody or immunoglobulin.

[0090] In some embodiments the asymmetric multispecific antibody comprises an IL-21 mutein attached via non-covalent or covalent bonding to an antibody or immunoglobulin, e.g., peptide bonds, disulfide bonds, and the like, or via physical forces, such as electrostatic, hydrogen, ionic, van der Waals, or hydrophobic or hydrophilic interactions. A variety of non-covalent coupling systems may be used, including, e.g., biotin-avidin, ligand/receptor, enzyme/substrate, nucleic acid/nucleic acid binding protein, lipid/lipid binding protein, cellular adhesion molecule partners; or any binding partners or fragments thereof which have affinity for each other. In some embodiments the attachment may be via direct covalent linkage by reacting targeted amino acid residues of the IL-21 mutein with an organic derivatizing agent that is capable of reacting with selected side chains or the N- or C-terminal residues of these targeted amino acids.

[0091] In some embodiments the attachment between the IL-21 mutein and the antibody or immunoglobulin may be via a linker. In some embodiments, the linker comprises a chain of atoms from 1 to about 60, or 1 to 30 atoms or longer, 2 to 5 atoms, 2 to 10 atoms, 5 to 10 atoms, or 10 to 20 atoms long. In some embodiments, the chain atoms are all carbon atoms. In some embodiments, the chain atoms in the backbone of the linker are selected from the group consisting of carbon (C), oxygen (O), nitrogen (N), and sulfur (S). Chain atoms and linkers may be selected according to their expected solubility (hydrophilicity) so as to provide a more soluble conjugate. In some embodiments, the linker provides a functional group that is subject to cleavage by an enzyme or other catalyst or hydrolytic conditions found in the target tissue or organ or cell. In some embodiments, the length of the linker is long enough to reduce the potential for steric hindrance. If the linker is a covalent bond or a peptidyl bond and the conjugate is a polypeptide, the entire conjugate can be a fusion protein. Such peptidyl linkers may be any length. Exemplary peptidyl linkers are from about 1 to 50 amino acids in length, 5 to 50, 3 to 5, 5 to 10, 5 to 15, or 10 to 30 amino acids in length, and are flexible or rigid. In some embodiments, the linker is a peptide comprising about 2 to about 20 amino acids. In some embodiments. the linker is a peptide comprising about 2 to about 15 amino acid, about 2 to about 10 amino acids, or about 2 to about 5 amino acids. Suitable peptide linkers are known in the art. See, e.g., Chen et al., Adv Drug Delivery Reviews 65(10): 1357-1369 (2013); Arai et al., Protein Eng Des Sel 14(8): 529-532 (2001); and Wriggers et al, Curr Trends in Peptide Science 80(6): 736-746 (2005). In one embodiment, the linker is a peptide comprising the amino acid sequence GGGGS (SEQ ID NO: 262).

[0092] The asymmetric multispecific antibody comprises an IL-21 mutein directly attached to an Fc of an antibody. Alternatively, the IL-21 mutein is attached to the Fc of the antibody via a linker, such as a peptide comprising the amino acid sequence of SEQ ID NO: 262. In various instances, the asymmetric multispecific antibody comprises a single IL-21 mutein, wherein said single IL-21 mutein is linked to the C-terminus of one of the two antibody heavy chains.

[0093] In various aspects, the antibody heavy chains comprise one or more amino acid modifications, relative to the naturally occurring counterpart, in order to improve half-life/stability or to render the antibody more suitable for expression/manufacturability (e.g., as an asymmetric multispecific antibody with the IL-21 mutein).

[0094] In exemplary instances, the antibody heavy chains are designed to prevent or reduce interaction between the antibody and Fc receptors. In exemplary instances, the antibody is a Stable Effector Functionless (SEFL) antibody comprising a constant region that lacks the ability to interact with Fcγ receptors. SEFL antibodies are known in the art. See, e.g., Liu et al., J Biol Chem 292; 1876-1883 (2016); and Jacobsen et al., J. Biol. Chem. 292; 1865-1875 (2017). In exemplary aspects, the SEFL antibody comprises one or more of the following mutations, numbered according to the EU system: L242C, A287C, R292C, N297G, V302C, L306C, and/or K334C. In exemplary aspects, the SEFL antibody comprises N297G. In exemplary aspects, the SEFL antibody comprises A287C, N297G, and L306C. In other exemplary aspects, the SEFL antibody comprises R292C, N297G, and V302C (i.e., SEFL2-2).

[0095] The antibody may comprise other half-life extension (HLE) modifications. In exemplary instances, the HLE modification occurs in the heavy chain constant region and comprises one or more of the following mutations, numbered according to the EU system: M252Y, S254T, and T256E. In exemplary instances, the antibody comprises one or two of M252Y, S254T, and T256E. In exemplary instances, the antibody comprises all three of M252Y, S254T, and T256E. In exemplary aspects, the heavy chain constant region comprises an amino acid sequence of SEQ ID NO: 545 or SEQ ID NO: 547 or SEQ ID NO: 549. In exemplary instances, the HLE modification occurs in the heavy chain constant region and comprises one or more of the following mutations, numbered according to the EU system: L309D, Q311H, and N434S. In exemplary instances, the antibody comprises one, two or all three of L309D, Q311H, and N434S. In exemplary instances, the antibody comprises all three of L309D, Q311H, and N434S. In exemplary aspects, the heavy chain constant region comprises an amino acid sequence of SEQ ID NO: 544 or SEQ ID NO: 546 or SEQ ID NO: 548.

[0096] In exemplary aspects, the antibody comprises SEFL2-2 modifications and HLE modifications. In some instances, the HLE modifications comprise one or two or all three of M252Y, S254T, and T256E. In exemplary aspects, the heavy chain constant region comprises an amino acid sequence of SEQ ID NO: 551 or SEQ ID NO: 553 or SEQ ID NO: 555. In some instances, the HLE modifications comprise one or two or all three of L309D, Q311H, and N434S. In exemplary aspects, the heavy chain constant region comprises an amino acid sequence of SEQ ID NO: 550 or SEQ ID NO: 552 or SEQ ID NO: 554. In exemplary aspects, the heavy chain additionally comprises charge pair mutations as described below.

[0097] In general, the C-terminal lysine of an antibody undergoes cleavage by carboxypeptidase during expression. A heavy chain constant region lacking the C-terminal Lys advantageously prevents carboxypeptidase to act on the heavy chain of the antibody. In exemplary aspects, the antibody comprises a heavy chain constant region lacking the C-terminal Lys and further comprises a linker, such as a peptide comprising the amino acid sequence of SEQ ID NO: 262.

[0098] In exemplary aspects, when the asymmetric multispecific antibody comprises only one IL-21 mutein, the Fc of the antibody comprises modifications designed to drive heterodimerization of the two heavy chains (one heavy chain fused to the IL-21 mutein and one heavy chain lacking the IL-21 mutein). Such modifications include Fc mutations such as knobs-into-holes, DuoBodies, Azymetric, charge pair, HA-TF, SEEDbody, and modifications with differential protein A affinity. See, e.g., Spiess et al., Molecular Immunology, 67(2, Part A), 2015, pp. 95-106. Knobs-into-holes mutations include T366W in the first heavy chain, and T366S, L368A, and/or Y407V in the second heavy chain. See, e.g., Ridgway et al., Protein Eng., 9 (1996), pp. 617-621; and Atwell et al., J. Mol. Biol., 270 (1997), pp. 26-35. DuoBody mutations include F405L in the first heavy chain and K409R in the second heavy chain. See, e.g., Labrijn et al., Proc. Natl. Acad. Sci. U.S.A., 110 (2013), pp. 5145-5150. Azymetric mutations include T350V, L351Y, F405A, and/or Y407V in the first heavy chain, and T350V, T366L, K392L, and/or T394W in the second heavy chain. See, e.g.. Von Kreudenstein et al., mAbs, 5 (2013), pp. 646-654. HA-TF mutations include S364H and/or F405A in the first heavy chain, and Y349T and/or T394F in the second heavy chain. See, e.g., Moore et al., mAbs, 3 (2011), pp. 546-557. SEEDbody mutations include IgG/A chimera mutations in the first heavy chain and IgG/A chimera mutations in the second heavy chain, See, e.g., Davis et al., Protein Eng. Des. Sel., 23 (2010), pp. 195-202. Differential protein A affinity mutations include H435R in one heavy chain and no mutations in the other heavy chain. See, e.g., U.S. Pat. No. 8,586,713.

[0099] In a particular example, the mutations are charge pair mutations. The following are examples of such charge pair mutations, numbered according to the EU system. Charge pair mutations include K409D in the first heavy chain and D399K in the second heavy chain; K392D in the first heavy chain and E356K in the second heavy chain; or both K409D and K392D in the first heavy chain and both D399K and E356K in the second heavy chain (the latter denoted as “V1” herein). See, e.g., Gunasekaran et al., J Biol Chem 285: 19637-19646 (2010). In another particular example, the charge pair mutations include K439D, K392D, and K409D in the first heavy chain; and E356K and D399K in the second heavy chain (denoted as “V103” herein). In yet another particular example, the charge pair mutations include K360E, K370E, K392E, and K409D in the first heavy chain; and E357K and D399K in the second heavy chain (denoted as “V131” herein). Charge pair mutations may also include K370D in the first heavy chain and E357K in the second heavy chain; or all three of K409D, K392D, and K370D in the first heavy chain and all three of D399K, E357K, and E356K in the second heavy chain (the latter denoted as “V4” herein). Additional charge pair mutations also include D221E. P228E, and/or L368E in the first heavy chain and D221R, P228R, and/or K409R in the second heavy chain. See, e.g., Strop et al., J. Mol. Biol., 420 (2012), pp. 204-219.

[0100] In embodiments where the asymmetric multispecific antibody comprises only one IL-21 mutein (i.e., the asymmetric multispecific antibody comprises an IL-21 mutein monomer) and the heavy chain contains the V1 charge pair mutations, the IL-21 mutein may be attached to the heavy chain containing the K409D and K392D mutations (e.g., the IL-21 mutein is attached to a heavy chain comprising SEQ ID NO: 294, 296, or 298), or the heavy chain containing the D399K and E356K mutations (e.g., the IL-21 mutein is attached to a heavy chain comprising SEQ ID NO: 295, 297, or 299. In a specific embodiment, the IL-21 mutein is attached to the heavy chain containing the D399K and E356K mutations.

[0101] In embodiments where the asymmetric multispecific antibody comprises only one IL-21 mutein (i.e., the asymmetric multispecific antibody comprises an IL-21 mutein monomer) and the heavy chain contains the V4 charge pair mutations, the IL-21 mutein may be attached to the heavy chain containing the K409D, K392D, and K370D mutations (e.g., the IL-21 mutein is attached to a heavy chain comprising SEQ ID NO: 288, 290, or 292), or the heavy chain containing the D399K, E357K, and E356K mutations (e.g., the IL-21 mutein is attached to a heavy chain comprising SEQ ID NO: 289, 291, or 293). In a specific embodiment, the IL-21 mutein is attached to the heavy chain containing the D399K, E357K, and E356K mutations.

[0102] In embodiments where the asymmetric multispecific antibody comprises only one IL-21 mutein (i.e., the asymmetric multispecific antibody comprises an IL-21 mutein monomer) and the heavy chain contains the V103 charge pair mutations, the IL-21 mutein may be attached to the heavy chain containing the K439D, K392D, and K409D mutations (e.g., the IL-21 mutein is attached to a heavy chain comprising SEQ ID NO: 472, 474, or 476), or the heavy chain containing the E356K and D399K mutations (e.g., the IL-21 mutein is attached to a heavy chain comprising SEQ ID NO: 473, 475, or 477). In a specific embodiment, the IL-21 mutein is attached to the heavy chain containing the E356K and D399K mutations.

[0103] In embodiments where the asymmetric multispecific antibody comprises only one IL-21 mutein (i.e., the asymmetric multispecific antibody comprises an IL-21 mutein monomer) and the heavy chain contains the V131 charge pair mutations, the IL-21 mutein may be attached to the heavy chain containing the K360E, K370E, K392E, and K409D mutations (e.g., the IL-21 mutein is attached to a heavy chain comprising SEQ ID NO: 478, 480, or 482), or the heavy chain containing the E357K and D399K mutations (e.g., the IL-21 mutein is attached to a heavy chain comprising SEQ ID NO: 479, 481, or 483). In a specific embodiment, the IL-21 mutein is attached to the heavy chain containing the E357K and D399K mutations.

[0104] In exemplary aspects, one or both heavy chains of the asymmetric multispecific antibody comprises a constant region comprising a peptide linker (e.g., SEQ ID NO: 262), SEFL or SEFL2-2 mutations, HLE modifications, a clipped C-terminal Lys, charge pair mutations, or any combination thereof. In exemplary instances, one or both heavy chains of the asymmetric multispecific antibody comprises a constant region comprising an amino acid sequence of any one of SEQ ID NOs: 265, 266, 267, 282, 284, 285, 286, 287, 288, 289, 290, 291, 292, 293, 294, 295, 296, 297, 298, 299, 300, 301, 302, 303, 304, 305, 306, 307, 308, 309, 310, 311, and 472-495.

[0105] In some embodiments the asymmetric multispecific antibody comprises a single IL-21 mutein attached to an antibody that binds to a protein of the immune checkpoint pathway selected from the group consisting of: CTLA-4, PD-1, PD-L1, PD-L2, B7-H3, B7-H4, CEACAM-1, TIGIT, LAG3, CD112, CD112R, CD96, TEV13, BTLA, or co-stimulatory receptor: ICOS, OX40, 41BB, CD27, GITR.

[0106] In a related embodiment the antibody is an anti-PD-1 antibody. Suitable PD-1 antibodies are known in the art and include but are not limited to nivolumab (BMS-936558), pembrolizumab (MK-3475), BMS 936558, BMS- 936559, TSR-042 (Tesaro), ePDR001 (Novartis), and pidilizumab (CT-011), as well as any of the anti-PD-1 antibodies disclosed in International Patent Publication No. WO 2019/140196, which is incorporated herein by reference. In various instances, the anti-PD-1 antibody comprises (a) a heavy chain (HC) complementarity-determining region (CDR) 1 amino acid sequence selected from the group consisting of: SEQ ID NOs: 312, 322, 332, 342, 352, 362, 372, and 382; (b) an HC CDR2 amino acid sequence selected from the group consisting of: SEQ ID NOs: 313, 323, 333, 343, 353, 363, 373, and 383; (c) an HC CDR3 amino acid sequence selected from the group consisting of: SEQ ID NOs: 314, 324, 334, 344, 354, 364, 374, and 384; (d) a light chain (LC) CDR1 amino acid sequence selected from the group consisting of: SEQ ID NOs: 315, 325, 335, 345, 355, 365, 375, and 385; (e) an LC CDR2 amino acid sequence selected from the group consisting of: SEQ ID NOs: 316, 326, 336, 346, 356, 366, 376, and 386; (f) an LC CDR3 amino acid sequence selected from the group consisting of: SEQ ID NOs: 317, 327, 337, 347, 357, 367, 377, and 387; or (g) a combination of any two, three, four, five, or six of (a)-(f). In some embodiments, the anti-PD-1 antibody protein product comprises a HC CDR1, HC CDR2, HC CDR3, LC CDR1, LC CDR2, LC CDR3, according to Table 2.

TABLE 2
Heavy chain (HC) and light chain (LC) CDRs

| | 20A2 | 20C1 | 22D4 | 20C1.006 | 20C1.009 | 20A2.003 | 22D4.006 | 22D4.017 |
|---|---|---|---|---|---|---|---|---|
| HC CDR1 | 312 | 322 | 332 | 342 | 352 | 362 | 372 | 382 |
| HC CDR2 | 313 | 323 | 333 | 343 | 353 | 363 | 373 | 383 |
| HC CDR3 | 314 | 324 | 334 | 344 | 354 | 364 | 374 | 384 |
| LC CDR1 | 315 | 325 | 335 | 345 | 355 | 365 | 375 | 385 |
| LC CDR2 | 316 | 326 | 336 | 346 | 356 | 366 | 376 | 386 |
| LC CDR3 | 317 | 327 | 337 | 347 | 357 | 367 | 377 | 387 |

[0107] In another embodiment the anti-PD-1 antibody comprises two light chains, each comprising a LC CDR1, LC CDR2, and LC CDR3 comprising the amino acid sequence of SEQ ID NOs: 385, 386, and 387, respectively; and two heavy chains, each comprising a HC CDR1, HC CDR2, and HC CDR3 comprising the amino acid sequence of SEQ ID NOs: 382, 383, and 384, respectively. In one related embodiment each light chain variable region comprises the amino acid sequence of SEQ ID NO: 389 and each heavy chain variable region comprises the amino acid sequence of SEQ ID NO: 388. In one related embodiment each light chain comprises the amino acid sequence of SEQ ID NO: 391 and each heavy chain comprises the amino acid sequence of SEQ ID NO: 390.

[0108] In some embodiments the asymmetric multispecific antibody is an anti-PD1 antibody comprising an IL-21 mutein attached to the C-terminus of one of the two antibody heavy chains of the anti-PD-1 antibody. In some embodiments a single IL-21 mutein is attached to the Fc of one of the two antibody heavy chains of the anti-PD-1 antibody. In some embodiments the single IL-21 mutein is directly attached to the Fc of the anti-PD-1 antibody, e.g., the single IL-21 mutein is attached to the Fc of the anti-PD-1 antibody without a linker. In some embodiments the single IL-21 mutein is attached to the Fc of the anti-PD-1 antibody with a linker (e.g., a peptide linker comprising SEQ ID NO: 262), e.g., a peptide linker connects the single IL-21 mutein to the Fc of the anti-PD-1 antibody.

[0109] In some embodiments the asymmetric multispecific antibody comprises two light chains, each comprising the amino acid sequence of SEQ ID NO: 391; a single heavy chain attached to an IL-21 mutein comprising the amino acid sequence of any one of SEQ ID NOs: 501-506; and a heavy chain comprising the amino acid sequence of any one of SEQ ID NOs: 556-558. In some embodiments the asymmetric multispecific antibody comprises two light chains, each comprising the amino acid sequence of SEQ ID NO: 391; one heavy chain comprising the amino acid sequence of SEQ ID NO: 556; and one heavy chain attached to an IL-21 mutein comprising the amino acid sequence of SEQ ID NO: 501 In some embodiments the asymmetric multispecific antibody comprises two light chains, each comprising the amino acid sequence of SEQ ID NO: 391; one heavy chain comprising the amino acid sequence of SEQ ID NO: 557; and one heavy chain attached to an IL-21 mutein comprising the amino acid sequence of SEQ ID NO: 502. In some embodiments the asymmetric multispecific antibody comprises two light chains, each comprising the amino acid sequence of SEQ ID NO: 391; one heavy chain comprising the amino acid sequence of SEQ ID NO: 558; and one heavy chain attached to an IL-21 mutein comprising the amino acid sequence of SEQ ID NO: 503. In some embodiments the asymmetric multispecific antibody comprises two light chains, each comprising the amino acid sequence of SEQ ID NO: 391; one heavy chain comprising the amino acid sequence of SEQ ID NO: 556; and one heavy chain attached to an IL-21 mutein comprising the amino acid sequence of SEQ ID NO: 504. In some embodiments the asymmetric multispecific antibody comprises two light chains, each comprising the amino acid sequence of SEQ ID NO: 391; one heavy chain comprising the amino acid sequence of SEQ ID NO: 557; and one heavy chain attached to an IL-21 mutein comprising the amino acid sequence of SEQ ID NO: 505. In some embodiments the asymmetric multispecific antibody comprises two light chains, each comprising the amino acid sequence of SEQ ID NO: 391; one heavy chain comprising the amino acid sequence of SEQ ID NO: 558; and one heavy chain attached to an IL-21 mutein comprising the amino acid sequence of SEQ ID NO: 506.

[0110] In another embodiment the anti-PD-1 antibody comprises two light chains, each comprising a LC CDR1, LC CDR2, and LC CDR3 comprising the amino acid sequence of SEQ ID NOs: 365, 366, and 367, respectively; and two heavy chains, each comprising a HC CDR1, HC CDR2, and HC CDR3 comprising the amino acid sequence of SEQ ID NOs:362, 363, and 364, respectively. In one related embodiment each light chain variable region comprises the amino acid sequence of SEQ ID NO: 369 and each heavy chain variable region comprises the amino acid sequence of SEQ ID NO: 368. In one related embodiment each light chain comprises the amino acid sequence of SEQ ID NO: 371 and each heavy chain comprises the amino acid sequence of SEQ ID NO: 370.

[0111] In some embodiments the asymmetric multispecific antibody comprises two light chains, each comprising the amino acid sequence of SEQ ID NO: 371; a single heavy chain attached to an IL-21 mutein comprising the amino acid sequence of any one of SEQ ID NOs: 513-518; and a heavy chain comprising the amino acid sequence of any one of SEQ ID NOs: 559-561. In some embodiments the asymmetric multispecific antibody comprises two light chains, each comprising the amino acid sequence of SEQ ID NO 371; one heavy chain comprising the amino acid sequence of SEQ ID NO: 559; and one heavy chain attached to an IL-21 mutein comprising the amino acid sequence of SEQ ID NO: 513. In some embodiments the asymmetric multispecific antibody comprises two light chains, each comprising the amino acid sequence of SEQ ID NO: 371; one heavy chain comprising the amino acid sequence of SEQ ID NO: 560; and one heavy chain attached to an IL-21 mutein comprising the amino acid sequence of SEQ ID NO: 514. In some embodiments the asymmetric multispecific antibody comprises two light chains, each comprising the amino acid sequence of SEQ ID NO: 371; one heavy chain comprising the amino acid sequence of SEQ ID NO: 561; and one heavy chain attached to an IL-21 mutein comprising the amino acid sequence of SEQ ID NO: 515. In some embodiments the asymmetric multispecific antibody comprises two light chains, each comprising the amino acid sequence of SEQ ID NO: 371; one heavy chain comprising the amino acid sequence of SEQ ID NO: 559; and one heavy chain attached to an IL-21 mutein comprising the amino acid sequence of SEQ ID NO: 516. In some embodiments the asymmetric multispecific antibody comprises two light chains, each comprising the amino acid sequence of SEQ ID NO: 371; one heavy chain comprising the amino acid sequence of SEQ ID NO: 560; and one heavy chain attached to an IL-21 mutein comprising the amino acid sequence of SEQ ID NO: 517. In some embodiments the asymmetric multispecific antibody comprises two light chains, each comprising the amino acid sequence of SEQ ID NO: 371; one heavy chain comprising the amino acid sequence of SEQ ID NO: 561; and one heavy chain attached to an IL-21 mutein comprising the amino acid sequence of SEQ ID NO: 518.

[0112] The invention provides a method for modulating the product quality of a recombinant asymmetric multispecific antibody comprising a mutein comprising the steps: a) establishing at least two cell cultures each inoculated with the same cell line expressing the asymmetric multispecific antibody; b) culturing at least one cell culture at a first temperature regime that consists of a single temperature and at least one cell culture at a second temperature regime; c) comparing at least one product-related impurity in the cell culture at each temperature regime; and d) selecting the temperature regime that reduces the expression of at least one product-related impurity comprising an unpaired or mis-paired long heavy chain; wherein amount of at least one product-related impurity resulting from an imbalance in the ratio of long heavy chain to short heavy chain in the harvested cell culture is decreased compared to the amount of the same product-related impurity in the harvest from a cell culture exposed to a temperature of 32° C. to 34° C. at some point during the culture.

[0113] The invention provides a method for modulating the product quality of an asymmetric multispecific anti-PD-1 antibody comprising an IL-21 mutein attached to the C-terminus of one of the two antibody heavy chains of the anti-PD-1 antibody expressed by a cell during cell culture comprising the steps: a) establishing a cell culture inoculated with a cell line expressing the antibody; culturing the cells at 36±1° C. for the duration of the culture; and harvesting the antibody; wherein amount of at least one product-related impurity resulting from an imbalance in the ratio of long heavy chain to short heavy chain in the harvested cell culture is decreased compared to the amount of the same product-related impurity in the harvest from a cell culture exposed to a temperature of 32° C. to 34° C. at some point during the culture.

[0114] The invention provides a method for establishing a cell line from a clonally derived culture expressing an asymmetric multispecific antibody comprising the steps: a) transforming cells with a gene encoding an asymmetric multispecific antibody; b) isolating at least one single stably transformed cell expressing the asymmetric multispecific antibody and establishing a clonally derived culture; c) establishing at least two cell cultures from one or more clonally derived cultures; d) culturing at least one cell culture from each clonally derived culture at a first temperature regime and culturing at least one cell culture from each clonally derived culture at a second temperature regime; e) culturing at least one cell culture at a first temperature regime that consists of a single temperature and at least one cell culture at a second temperature regime; f) comparing the molar ratio of long heavy chain to short heavy chain produced by the cells at each temperature regime; g) selecting at least one clonally derived culture that produced a balanced or lower molar ratio of long heavy chain to short heavy chain; and h) establishing a cell line from the clonally derived culture.

[0115] The invention provides a method for producing an isolated, purified, recombinant asymmetrical multispecific antibody, the method comprising the steps: a) isolating at least one single stably transfected cell expressing the asymmetric multispecific antibody and establishing a clonally derived culture; b) establishing at least two cell cultures from one or more of the clonally derived cultures; c) culturing at least one cell culture from each clonally derived culture at a first temperature regime comprising a single temperature and culturing at least one cell culture from each clonally derived culture at a second temperature regime; d) comparing the amount of at least one product-related impurity comprising an unpaired or mis-paired long heavy chain produced by the cells cultured at each temperature regime; e) selecting the cell culture that modulated production of the product related impurity; f) establishing a cell line expressing the asymmetrical multispecific antibody from the selected clonally derived culture; g) inoculating a bioreactor with the cell line expressing the asymmetrical multispecific antibody; h) culturing the host cells to express the asymmetrical multispecific antibody at the temperature regime that modulated the production of the product related impurity; i) harvesting the recombinant asymmetrical multispecific antibody from the cell culture; j) processing the recombinant asymmetrical multispecific antibody through one or more chromatography unit operations, and k) obtaining an isolated, purified, recombinant asymmetrical multispecific antibody. In one embodiment is provided an isolated, purified, recombinant asymmetrical multispecific antibody made according the method above. In one embodiment is provided a pharmaceutical composition comprising the isolated, purified, recombinant asymmetrical multispecific antibody made according to the method above.

[0116] Also provided herein is a method for controlling cell growth in a nanofluidic chamber of a nanofluidic chip through one or more temperature shifts to extend cell culture duration, allow for collecting additional measurements of protein secretion levels and minimizing the risks of cell cross contamination during export procedure executed under reduced temperature conditions. Single cells expressing a recombinant protein, such as a monoclonal antibody, multispecific antibody, asymmetric protein, and the like, are deposited on a nanofluidic chip and subjected to static temperature culture where a constant temperature is maintained for the duration of the culture, or a biphasic culture where after an initial incubation at a first temperature condition, a temperature shift to one or more lower temperatures is applied. The temperature reduction led to growth inhibition, preventing cell overgrowth, reducing cell-cross contamination risks, and enabled long-term culture. while altering recombinant protein production profiles.

[0117] The method makes use of nanofluidic cell culture for screening thousands of clonally derived cell lines that are expanded and evaluated for secretion of desired therapeutic biologics. In one embodiment a nanofluidic cell culture system is a Beacon® Optofludic system (Berkeley Lights, Inc., Emeryville, CA), a fully integrated nanofluidic cell culture system that makes use of nanofluidic chips that allow for the isolation of thousands of clonal cell lines. The Beacon® Optofludic platform is suitable for cell line development workflow and enables assessment of growth and desired secretory profiles at the single cell or a few cell levels. Cells are loaded into nanofluidic chambers of a nanofluidic chip and can be simultaneously cultured and assayed for recombinant protein secretion. Candidate clones are selected based on desired growth and secretory profiles and exported off the chip and subjected to typical scale-up workflows. Additional single-cell sorting and analytical platforms are also contemplated for use with the methods of the present disclosure. In one embodiment, a lithographic-based microarrays or nanowell-assisted cell patterning platforms (Love et al., Nat. Biotechnol., 24(6) 703 (2006); and Ozkumur et al., Materials Views, 11(36). 4643-4650 (2015) is contemplated.

[0118] As used herein. “nanofluidic chamber of a nanofluidic chip” refers to a portion or section of a nanofluidic device that is capable of isolating a single cell. By way of example, a nanofluidic chamber can be a NanoPen™ chamber associated with Berkeley Light's Beacon® technology platform as described herein. In some embodiments, the nanofluidic chip or device comprises hundreds or thousands of individual chambers each capable of isolating a single cell. In some embodiments, the nanofluidic device or chip comprises 1758 chambers, 3,500 chambers, 11,000 chambers, 14,000 chamber, or 20,000 chambers. Such nanofluidic chips are known in the art and available commercially, BLI OptoSelect™ Chip, BLI OptoSelect™ Chip 1750b, BLI OptoSelect™ Chip 3500, BLI OptoSelect™ Chip 11k, BLI OptoSelect™ Chip 14K, BLI OptoSelect™ Chip 20k.

[0119] Methods for producing biomolecules selected using the method are also contemplated by the present disclosure. For example, in one embodiment, a biomolecule grown under the conditions of the method are exported to multi-well plates, such as 96-, 12-, or 24-well plates. The effects of static and shifted temperature on the recombinant protein are analyzed and used to aid early clone selection. Cell lines that secrete a recombinant protein having desired properties and product quality attributes are isolated and transferred to a vessel for culturing under conditions that allow production of the recombinant protein in vessels and under conditions described herein.

[0120] The invention provides a method for controlling the growth of cells in a nanofluidic chamber of a nanofluidic chip comprising the steps of: (a) isolating a single cell into a nanofluidic chamber of a nanofluidic chip, wherein said cell comprises an expression construct capable of expressing a recombinant protein; (b) culturing the cell at a first temperature; (c) at a predetermined point, culturing the cells at a second temperature; and (d) exporting the cells out of the nanofluidic chamber and into a culture vessel. In one embodiment the number of cells per chamber at export is lower compared to a single cell derived cell line cultured under similar conditions at a constant temperature for the duration of the culture.

[0121] The invention also provides a method for minimizing cell cross contamination during export of cells grown in a nanofluidic chamber of a nanofluidic chip comprising the steps of: (a) isolating a single cell into a nanofluidic chamber of a nanofluidic chip, wherein said cell comprises an expression construct capable of expressing a recombinant protein; (b) culturing the cell at a first temperature; (c) at a predetermined point. culturing the cells at a second temperature; and (d) exporting the cells out of the nanofluidic chamber and into a culture vessel at the lower temperature setting applied during the export procedure. The number of cells per chamber at export is lower compared to a single cell cultured under similar conditions a constant temperature for the duration of the culture.

[0122] The invention further provides a method to improve clone selection for cells grown in a nanofluidic chamber of a nanofluidic chip comprising the steps of: (a) isolating a single cell into a nanofluidic chamber of a nanofluidic chip, wherein said cell comprises an expression construct capable of expressing a recombinant protein; (b) culturing the cell at a first temperature; (c) lowering the temperature of the culture to a second temperature no earlier than day 3 of the culture; and (d) exporting the cells out of the nanofluidic chamber at least one to four days after the temperature shift.

[0123] In one embodiment exporting the cells out of the nanofluidic chamber is at least 2-4 days after the temperature shift. In one embodiment exporting the cells out of the nanofluidic chamber is at least 3-4 days after the temperature shift. In one embodiment exporting the cells out of the nanofluidic chamber is at least 2-3 days after the temperature shift. In one embodiment exporting the cells out of the nanofluidic chamber is at least 1-2 days after the temperature shift. In one embodiment, exporting the cells out of the nanofluidic chamber is at least 1, 2, 3, or 4 days after the temperature shift. In one embodiment, exporting the cells out of the nanofluidic chamber is at least 1 day after the temperature shift. In one embodiment, exporting the cells out of the nanofluidic chamber is at least 2 days after the temperature shift. In one embodiment, exporting the cells out of the nanofluidic chamber is at least 3 days after the temperature shift. In one embodiment, exporting the cells out of the nanofluidic chamber is at least 4 days after the temperature shift.

[0124] In one embodiment the first temperature is selected from 35° C. to 37° C. In one embodiment the first temperature is 35° C., 36° C., or 37° C. In one embodiment the first temperature is 35° C. In one embodiment the first temperature is 36° C. In one embodiment the first temperature is 37° C.

[0125] In one embodiment the second temperature is selected from 28° C. to 34° C. In one embodiment the second temperature is selected from 28° C., 29° C., 30° C., 31° C., 32° C., 33° C., or 34° C.±0.5° C. In one embodiment the second temperature is selected from 28° C. In one embodiment the second temperature is selected from 29° C. In one embodiment the second temperature is selected from 30° C. In one embodiment the second temperature is selected from 31° C. In one embodiment the second temperature is selected from 32° C. In one embodiment the second temperature is selected from 33° C. In one embodiment the second temperature is selected from 34° C.

[0126] In one embodiment the second temperature is about 1° C. to about 9° C. lower than the first temperature. In one embodiment the first temperature is 36° C. and the second temperature is 32° C. to 32.5° C.

[0127] In one embodiment the predetermined point is on day 3 to day 5 of the culture. In one embodiment the predetermined point is on day 3 to day 4 of the culture. In one embodiment the predetermined point is on day 4 to day 5 of the culture. In one embodiment the predetermined point is on day 3, day 4 or day 5 of the culture. In one embodiment the predetermined point is on day 3 of the culture. In one embodiment the predetermined point is on day 4 of the culture. In one embodiment the predetermined point is on day 5 of the culture.

[0128] In one embodiment export is on day 6 to day 8 of the culture. In one embodiment export is on day 6 to day 7 of the culture. In one embodiment export is on day 7 to day 8 of the culture. In one embodiment export is on day 6, day 7 or day 8 of the culture. In one embodiment export is on day 6 of the culture. In one embodiment export is on day 7 of the culture. In one embodiment export is on day 8 of the culture.

[0129] In one embodiment the nanofluidic chip comprises 1758 chambers, 3,500 chambers, 11,000 chambers, 14,000 chamber, or 20,000 chambers.

[0130] In one embodiment the culture vessel is a multi-well plate. In one embodiment the protein secretion profiles before and after the temperature shift are compared. In one embodiment the nanofluidic chip comprises 1758 chambers.

[0131] By “culture” or “culturing” is meant the growth and propagation of cells outside of a multicellular organism or tissue. Suitable culture conditions for mammalian cells are known in the art. Cell culture media and tissue culture media are used interchangeably to refer to media suitable for growth of a host cell during in vitro cell culture. Typically, cell culture media contains a buffer, salts, energy source, amino acids, vitamins and trace essential elements. Any media capable of supporting growth of the appropriate host cell in culture can be used. Cell culture media, which may be further supplemented with other components to maximize cell growth, cell viability, and/or recombinant protein production in a particular cultured host cell, are commercially available and include RPMI-1640 Medium, RPMI-1641 Medium, Dulbecco's Modified Eagle's Medium (DMEM), Minimum Essential Medium Eagle, F-12K Medium, Ham's F12 Medium, Iscove's Modified Dulbecco's Medium, McCoy's 5A Medium, Leibovitz's L-15 Medium, and serum-free media such as EX-CELL™ 300 Series, among others, which can be obtained from the American Type Culture Collection or SAFC Biosciences, STEMCELL Technologies Inc as well as other vendors. Cell culture media can be serum-free, protein-free, growth factor-free, and/or peptone-free media. Cell culture may also be enriched by the addition of nutrients and used at greater than its usual, recommended concentrations.

[0132] Various media formulations may be used at all stages of cell culture, from clone selection and cell line development and through large scale production cell culture. Different media formulations can be used during selection, to facilitate transition from one stage (e.g., the growth stage or phase) to another (e.g., the production stage or phase), and/or to optimize conditions during cell culture (e.g. concentrated media provided during perfusion culture, feed media during fed batch culture). A selection media can be formulated to apply selective pressure to newly transformed cells. A growth medium formulation can be used to promote cell growth and minimize protein expression. A production medium formulation can be used to promote production of the protein of interest and maintenance of the cells, with a minimal of new cell growth). A feed media, typically a media containing more concentrated components such as nutrients and amino acids, which are consumed during the course of the production phase of the cell culture may be used to supplement and maintain an active culture, particularly a culture operated in fed batch, semi-perfusion, or perfusion mode. Such a concentrated feed medium can contain most of the components of the cell culture medium at, for example, about 5×, 6×, 7×, 8×, 9×, 10×, 12×, 14×, 16×, 20×, 30×, 50×, 100×, 200×, 400×, 600×, 800×, or even about 1000× of their normal amount.

[0133] Cell cultures can be operated in a batch, fed batch, continuous, semi-continuous, perfusion mode or any combination therein.

[0134] Temperature shifts are commonly used in Chinese hamster ovary (CHO) cell cultivation to influence the performance of the culture and recombinant expression of proteins. CHO cells are typically grown at physiological temperature, around 36° C.-37° C. A temperature shift to a hypothermic condition around 30° C.-34° C. is used to control such aspects of the culture as cell growth, improve recombinant protein production, yield, and/or maintain cell viability, and the like.

[0135] In addition, chemical inducers of protein production, such as, for example, caffeine, butyrate, and hexamethylene bisacetamide (HMBA), may be added to the cell culture. If there is a temperature shift, the inducers may be added at the same time as, before, and/or after a temperature shift. If inducers are added after a temperature shift, they can be added from one hour to five days after the temperature shift, optionally from one to two days after the temperature shift. pH may also be shifted during culture, either independently or in combination with other methods.

[0136] Host cells may be cultured in suspension or in an adherent form, attached to a solid substrate. Cells may be cultured in multi-well plates, such as 96, 24, or 6 well and deep well plates. Cell cultures can be established in fluidized bed bioreactors, gas permeable culture bags, gas permeable bioreactors, hollow fiber bioreactors, roller bottles, spin tubes, shake flasks, or stirred tank bioreactors, with or without microcarriers. Mammalian cells, such as CHO cells, may be cultured in bioreactors at a smaller scale of less than 100 ml to less than 1000 mls. Alternatively, larger scale bioreactors that contain 1000 mls to over 20,000 liters of media can be used. Large scale cell cultures, such as for clinical and/or commercial scale biomanufacturing of protein therapeutics, may be maintained for weeks and even months, while the cells produce the desired protein(s).

[0137] The term “unit operation” refers to a functional step that is performed as part of the process of purifying a recombinant protein of interest. For example, a unit operation can include steps in operations such as, but not limited to, harvest, capture, purification, polish, viral inactivation, virus filtration, concentration and/or formulation the recombinant protein of interest. Unit operations can be designed to achieve a single objective or multiple objectives, such as a combination of capture and virus inactivation steps. Unit operations can also include holding or storing steps between processing steps.

[0138] The recombinant protein is harvested from the cell culture media. Methods for harvesting protein from suspension cells are known in the art and include, but are not limited to, acid precipitation, accelerated sedimentation such as flocculation, separation using gravity, centrifugation, acoustic wave separation, filtration, including membrane filtration using ultrafilters, microfilters, tangential flow filters, alternative tangential flow filters, depth filters, and alluvial filters. Recombinant proteins expressed by prokaryotes are retrieved from inclusion bodies in the cytoplasm by processes incorporating redox folding processes known in the art.

[0139] The harvested protein can then be purified, or partially purified, away from any impurities, such as remaining cell culture media, cell extracts, undesired components, host cell proteins, improperly expressed proteins and the like, using one or more unit operations. By “purifying” is meant increasing the degree of purity of the asymmetric multispecific antibody in the composition by removing (partially or completely) at least one impurity or contaminant from the composition. Recovery and purification of multispecific antibody is accomplished by the downstream unit operations, in particular, those operations involving chromatography, resulting in a more “homogeneous” asymmetric multispecific antibody composition that meets yield and product quality targets.

[0140] A capture unit operation may include capture chromatography that makes use of resins and/or membranes containing agents that will bind and/or interact with at least one desired protein, impurity or contaminant. Examples of capture chromatography include affinity chromatography, size exclusion chromatography, ion exchange chromatography, hydrophobic interaction chromatography (HIC), immobilized metal affinity chromatography (IMAC), and the like. Such materials are known in the art and are commercially available. Affinity chromatography is commonly used in biomanufacturing processes as an initial capture step to isolate and concentrate recombinant proteins of interest having an Fc component. Examples of such affinity chromatography materials include those that make use of Staphylococcus proteins such as Protein A, Protein G, Protein A/G, and Protein L; substrate-binding capture mechanisms; antibody- or antibody fragment-binding capture mechanisms; aptamer-binding capture mechanisms; cofactor-binding capture mechanisms; and the like. Immobilized metal affinity chromatography can be used to capture proteins that have or have been engineered to have affinity for metal ions. Affinity chromatography material is available commercially from a number of vendors. For example, MABSELECT™ SURE Protein A, Protein A Sepharose FAST FLOW™ (Cytiva, Marborough, MA), PROSEP-A™ (Merck Millipore, U.K), TOYOPEARL™ 650M Protein A (TosoHass Co., Philadelphia, PA).

[0141] Intermediate and/or polishing unit operations make use of various chromatography methods for the continued purification of the protein of interest and clearance of contaminants and impurities such as DNA, host cell proteins; removal of product-specific impurities, variant products and aggregates, virus adsorption, and the like. These chromatography unit operations makes use of resins and/or membranes containing agents that can be used in either a flow-through mode where the protein of interest is contained in the eluent and the contaminants and impurities are bound to the chromatography medium; frontal or overloaded chromatography mode where a solution containing the protein of interest is loaded onto a column until adsorption sites on arc occupied and the species with the least affinity for the stationary phase (the protein of interest) starts to elute; bind and elute mode, where the protein of interest is bound to the chromatography medium and eluted after the contaminants and impurities have flowed through or been washed off the chromatography medium, or any other method. Examples of such chromatography methods include ion exchange chromatography (IEX), such as anion exchange chromatography (AEX) and cation exchange chromatography (CEX); hydrophobic interaction chromatography (HIC); mixed modal or multimodal chromatography (MM), hydroxyapatite chromatography (HA); reverse phase chromatography and gel filtration, among others.

[0142] Multiple chromatography unit operations, typically one, two, or three, each performing a different function, are combined depending on the requirements of the manufacturing process. Ion exchange chromatography, based on electrostatic interactions between charged surfaces, separates proteins of interest from impurities based on differential absorption and desorption. Cation exchange chromatography refers to chromatography performed on a solid phase medium that is negatively charged and has free cations for exchange with cations in an aqueous solution passed over or through the solid phase. The charge may be provided by attaching one or more charged ligands to the solid phase, e.g. by covalent linking. Alternatively. or in addition, the charge may be an inherent property of the solid phase (e.g. as is the case for silica, which has an overall negative charge). Cation exchange chromatography is typically run in bind and elute mode, the high pI of many proteins of interest enable binding to the chromatography material. Cation exchange chromatography may also be run in flow through mode. CEX chromatography is typically used to remove high molecular weight (HMW) contaminants, process related impurity, and/or viral clearance. Commercially available cation exchange mediums are available and include but are not limited to sulphopropyl (SP) immobilized on agarose (e.g. SP-SEPHAROSE FAST FLOW™, SP-SEPHAROSE FAST FLOW XL™ or SP-SEPHAROSE HIGH PERFORMANCE™, CAPTO S™, CAPTO SP ImpRes™, CAPTO S ImpAct™ (Cytiva), FRACTOGEL-SO3™, FRACTOGEL-SE HICAP™, and FRACTOPREP™ (EMD Merck, Darmstadt, Germany), TOYOPEARL® XS, TOYOPEARL® HS (Tosh Bioscience, King of Prussia, PA), UNOsphere™ (BioRad, Hercules, CA), S Ceramic Hyper D™ F (Pall, Port Washington, NY), POROS™ (ThermoFisher, Waltham, MA).

[0143] Anion exchange chromatography refers to chromatography performed on a solid phase medium that is positively charged and has free anions for exchange with anions in an aqueous solution passed over or through the solid phase. Anion exchange chromatography is typically run in flow through mode. Due to the high pI of many proteins of interest they do not to bind to the AEX chromatography material. AEX chromatography is used, for example, for viral clearance and impurity removal. Commercially available anion exchange mediums are available and include, but are not limited to, sulphopropyl (SP) immobilized on agarose (e.g. Source 15 Q, Capto™ Q, Q-SEPHAROSE FAST FLOW™ (Cytiva), FRACTOGEL EDM TMAE™, FRACTOGEL EDM DEAE™ (EMD Merck), TOYOPEARL Super Q® (Tosh Bioscience), POROS HQ™, POROS XQ™, (ThermoFisher).

[0144] Mixed-mode or multi-mode chromatography (MMC) refers to chromatography performed on a solid phase medium that makes use of a combination of interaction mechanisms, such as ion exchange (CEX or AEX) and hydrophobic interaction, and others. Commercially available multi-modal chromatography media are available and include Capto™ Adhere (Cytiva).

[0145] Hydrophobic interaction chromatography refers to chromatography performed on a solid phase medium that makes use of the interaction between hydrophobic ligands and hydrophobic residues on the surface of a protein of interest. Commercially available hydrophobic interaction chromatography media includes but are not limited to Phenyl Sepharose™ (Cytiva), Tosoh hexyl (Tosoh Bioscience), and Capto™ phenyl (Cytiva).

[0146] Hydroxyapatite chromatography refers to chromatography performed on a solid phase medium that makes use of positively charged calcium and negatively charged phosphate and depending on the pI of the protein and the pH of the buffer, can act as a cation or anion.

[0147] Unit operations comprising inactivating, reducing and/or eliminating viral contaminants may include processes that manipulate the environment and/or filtration. Various methods can be employed for virus inactivation and include heat inactivation/pasteurization, UV and gamma ray irradiation, use of high intensity broad spectrum white light, addition of chemical inactivating agents, surfactants, and solvent/detergent treatments. Surfactants, such as detergents, solubilize membranes and therefore can be very effective in specifically inactivating enveloped viruses. One method for achieving virus inactivation is incubation at low pH (e.g., pH<4). Low pH virus inactivation can be followed with a neutralization unit operation that readjusts the viral inactivated solution to a pH more compatible with the requirements of the following unit operations. It may also be followed by filtration, such as depth filtration, to remove any resulting turbidity or precipitation. Viral filtration can be performed using micro- or nano-filters, such as those available from Asahi Kasei (Plavona®) and EDM Millipore (VPro®).

[0148] Unit operations may also comprise product concentration and buffer exchange of the protein of interest into a desired formulation buffer for bulk storage of the drug substance can be accomplished using known methods for ultrafiltration and diafiltration (UF/DF). Unit operations related to drug product fill/finish can follow.

[0149] Critical attributes and performance parameters of the purified asymmetric multispecific antibody can be measured to better inform decisions regarding performance of each step during manufacture. These critical attributes and parameters can be monitored real-time, near real-time, and/or after the fact. Key critical parameters such as media components that are consumed (such as glucose), levels of metabolic by-products (such as lactate and ammonia) that accumulate, as well as those related to cell maintenance and survival, such as dissolved oxygen content can be measured during cell culture. Critical attributes such as specific productivity, viable cell density, pH, osmolality, appearance, color, aggregation, percent yield and titer may be monitored during appropriated stages in the manufacturing process. Monitoring and measurements can be done using known techniques and commercially available equipment.

[0150] The pharmaceutical compositions (solutions, suspensions or the like), may include one or more of the following: buffers such as neutral buffered saline, phosphate buffered saline and the like; carbohydrates such as glucose, mannose, sucrose or dextrans, mannitol; proteins; polypeptides or amino acids such as glycine; antioxidants; chelating agents such as EDTA or glutathione; adjuvants (e.g., aluminum hydroxide); and preservatives; sterile diluents such as water for injection, saline solution, preferably physiological saline, Ringer's solution, isotonic sodium chloride, fixed oils such as synthetic mono- or diglycerides which may serve as the solvent or suspending medium, polyethylene glycols, glycerin, propylene glycol or other solvents; antibacterial agents such as benzyl alcohol or methyl paraben; antioxidants such as ascorbic acid or sodium bisulfite; chelating agents such as ethylenediaminetetraacetic acid; buffers such as acetates, citrates or phosphates and agents for the adjustment of tonicity such as sodium chloride or dextrose. The parenteral preparation can be enclosed in ampoules, disposable syringes or multiple dose vials made of glass or plastic.

[0151] While the terminology used in this application is standard within the art, definitions of certain terms are provided herein to assure clarity and definiteness to the meaning of the claims. Units, prefixes, and symbols may be denoted in their SI accepted form. Numeric ranges recited herein are inclusive of the numbers defining the range and include and are supportive of each integer within the defined range. The methods and techniques described herein are generally performed according to conventional methods well known in the art and as described in various general and more specific references that are cited and discussed throughout the present specification unless otherwise indicated. All documents, or portions of documents, cited in this application, including but not limited to patents, patent applications, articles, books, and treatises, are hereby expressly incorporated by reference.

[0152] The present invention is not to be limited in scope by the specific embodiments described herein that are intended as single illustrations of individual aspects of the invention, and functionally equivalent methods and components are within the scope of the invention. What is described in an embodiment of the invention can be combined with other embodiments of the invention. Indeed, various modifications of the invention, in addition to those shown and described herein will become apparent to those skilled in the art from the foregoing description and accompanying drawings. Such modifications are intended to fall within the scope of the appended claims.

[0153] The following examples, including the experiments conducted and the results achieved, are provided for illustrative purposes only and are not to be construed as limiting the scope of the appended claims.

### EXAMPLES

### Example 1

[0154] CHO cells were transfected with a plasmid DNA encoding a bifunctional fusion protein comprising a conjugate of an IL-21 mutein linked to the C-terminus of one of the two antibody heavy chains of an anti-PD-1 antibody. The IL-21-anti-PD-1 conjugate comprised a “short heavy chain” (an anti-PD1 heavy chain) and a “long heavy chain” (an anti-PD 1 heavy chain linked to the IL-21 mutein). The weight, length and amino acid composition differed between the two heavy chains. Following transfection, pool populations stably expressing the conjugate were generated through repeated passaging in a selective growth medium. When the pools reached above 90% viability as determined by Trypan Blue Exclusion and maintained consistent doubling times, single cell clones were isolated from the pools.

[0155] Single cell clones were expanded and cultured in 96 well plates (Corning, Corning, NY) which were maintained at 36° C., 5% CO₂, 85% relative humidity. The cells were maintained by passaging until they reached a desired cell viability density.

[0156] The clones were then inoculated at 8×10⁵ cells/ml into 24 well plates (Axygen, Union City, CA) with a 3.5 ml working volume of serum free, chemically defined culture medium. The plates were maintained at 36° C., 5% CO₂, 85% relative humidity, shaken at 225 rpm for 10 days and fed on days 3, 6, and 8 at 7% post-inoculation volume. The clones were harvested on day 10. In-process samples were taken to monitor culture conditions. Viable cell density (VCD) and viability (%) were determined using a Vi-Cell XR Cell Viability Analyzer (Beckman Coulter, Indianapolis, IN). Glucose, lactate, and NH4+ concentrations were determined using a BioProfile Flex Analyzer (Nova Biomedical, Waltham, MA).

[0157] Samples from each culture were taken for titer determination and product quality analysis. Titers were measured by high performance liquid chromatography (HPLC) via affinity chromatography (Protein A, Waters, Milford, MA). Integrated viable cell density (IVCD) was calculated by a trapezoidal rule for VCD versus culture time. Cell specific productivity (qp) was calculated by titer divided by IVCD. Harvest material was used for product quality assessments. The top four clones were selected for bioreactor culture.

[0158] The top four clones (Clones 1-4) were inoculated at 10E5 cells/ml into 2×7 L bioreactors at a working volume of 4.4L serum free, chemically defined culture medium. The bioreactors were maintained at 36° C., 5% CO₂, 6.90 pH, 315 rpm. Perfusion was initiated on day 3 and used an alternating tangential flow filter system, (Repligen, Waltham, MA) with a 30,000 NMWC filter (GE Healthcare, Westborough, MA) at a rate of 0.5 reactor volumes/day on days 3-6; 0.75 reactor volumes/day for days 7-8; and 1.0 reactor volumes/day for days 9-15, except for Clone 2 which was stopped on day 14. Daily samples were taken to monitor culture conditions as described above for the 24 well plates (e.g., pH, osmolality, lactate/glucose, etc.).

[0159] When culture viable cell density (VCD) exceeded 300E5 cells/ml the temperature was shifted to 32.5° C. and the culture was maintained at that temperature until harvest. The clones were harvested from day 12 to day 15 using a 750,000 NMWC filter, GE Healthcare, except for Clone 2 which was harvested from day 12 to day 14. Culture conditions and harvested culture supernatant were monitored using the same methods as described above for the 24 well plates.

[0160] Unexpectedly, the samples exposed to the lower culture temperature (32.5° C.) showed an increase in the molar ratio of long heavy chain (LHC) to short heavy chain (SHC) for all clones tested.

[0161] A second experiment was performed to determine the cause of the increase in the molar ratio of long heavy chain to short heavy chain. A 10-day fed-batch culture was performed to study the response of Clone 4 cultured at a constant 36° C. and under conditions that incorporated a temperature shift during the culture (36° C. to 32.5° C.). Cells from Clone 4 were inoculated at 8×10⁵ cells/ml into two 24 deep-well plates (Axygen, Union City, CA) with a 3.5 ml working volume of serum free, chemically defined culture medium. The plates were maintained at 36° C., 5% CO₂, 85% relative humidity, shaken at 225 rpm. One plate was subjected to a temperature shift to 32.5° C., 5% CO₂, 225 rpm. Both cultures were fed on day 3, 6, and 8 at 7% of post-inoculation volume. The cells from both cultures were harvested on day 10. Analytical measurements were taken throughout the 10-day culture, as described above. The harvested material was then purified using Protein A affinity chromatography.

[0162] Cells from Clones 1-3 were also tested in a 15-day perfusion culture in 7 L bioreactors to study the protein response of the clones under perfusion conditions maintained a constant temperature of 36° C. throughout. Clone 4 was tested in a 15-day perfusion vulture in a 7 L bioreactor to study the protein response of the clone under perfusion conditions with a temperature shift (36° C.-32.5° C.).

[0163] The test clones and controls were inoculated at 10E5 cells/ml into 2×7 L bioreactors at a working volume of 4400 ml of serum free, chemically defined culture medium. The bioreactors were maintained at 36° C. 5% CO₂, 6.90 pH. 315 rpm. Perfusion was initiated on day 3 and used an alternating tangential flow filter system. (Repligen. Waltham. MA) with a 30,000 NMWC filter (GE Healthcare, Westborough, MA) at a rate of 0.5 reactor volumes/day on days 3-6; 0.75 reactor volumes/day for days 7-8; and 1.0 reactor volumes/day for days 9-15, except for Clone 2 which was stopped on day 14. Daily samples were taken to monitor culture conditions as described above. Clones 1 and 3 were harvested from day 12 to day 15 using a 750,000 NMWC filter, (GE Healthcare), except for Clone 2 which was harvested from day 12 to day 14. Monitoring culture conditions took place throughout. Analytical measurements were taken though out the cultures as described above. The harvested material was purified using Protein A affinity chromatography followed by cation exchange chromatography in bind and elute mode.

[0164] For both the fed-batch and perfusion samples, the molar ratio of long heavy chain to the short heavy chain was determined by reduced capillary electrophoresis sodium dodecyl sulfate (rCE-SDS). Mean Pre-Peak % was determined by non-reduced capillary electrophoresis-sodium dodecyl sulfate (nrCE-SDS). Mean LMW % was determined using size exclusion ultra high-performance liquid chromatography (SE-UHPLC). For both the fed-batch and perfusion samples, the molar ratio of long heavy chain to the short heavy chain was determined by reduced capillary electrophoresis-sodium dodecyl sulfate (rCE-SDS).

[0165] An increase in the % long heavy chain (% LHC) when cells expressing the IL-2-anti-PD-1 conjugate was subjected to perfusion culture (P) with a temperature shift to 32.5° C. (open bars), compared to fed batch culture (FB) at a constant 36° C. (striped bars), see FIG. 1A. The data confirm that the change in ratio was due to the temperature shift and not to the switch in culture methods. It was found that partial reduced species produced during the perfusion culture with a temperature shift from 36° C. to 32.5° C. were not possible to clear during downstream purification. A comparison of the Pre-peaks from the temperature shifted perfusion culture (P) subjected to purification by Protein A affinity chromatography (left open bar) and cation exchange chromatography (right open bar) and the constant temperature fed batch culture (FB) subjected to Protein A affinity chromatography (striped bar) is shown in FIG. 1B. The perfusion culture samples subjected to a temperature shift had a higher percentage of LMW than did the fed batch culture samples subjected to a constant temperature. See FIG. 1C. In particular, excess long heavy chain could not be separated by CEX purification. A chromatogram of the Pre-peak impurities characterized by nrCEX-SDS from the CEX pool is provided in FIG. 1D. Excess long heavy chain species from the perfusion samples could not be separated by CEX chromatography.

[0166] Comparing the molar ratio of the long heavy chain to the short heavy chain as determined by rCE showed that there was a better correlation between the fed batch samples and the perfusion samples if both were subjected to the same temperature regime. FIG. 2A shows fed batch culture samples grown at a constant 36° C. compared to perfusion samples grown with a temperature shift from 36° C. to 32.5° C. FIG. 2B shows fed batch culture samples compared to perfusion samples, both grown with a temperature shift from 36° C. to 32.5° C. The data points for both culture methods grown at a constant 36° C. were limited and not included in the comparison.

[0167] Comparing the % LMW determined by SEC showed that there was better correlation between the fed batch samples and the perfusion samples if they were subjected to the same temperature regime. FIG. 3A shows fed batch culture samples grown at a constant 36° C. compared to perfusion samples grown with a temperature shift from 36° C. to 32.5° C. FIG. 3B shows fed batch culture samples compared to perfusion samples, both grown with a temperature shift from 36° C. to 32.5° C. The data points for both culture methods grown at a constant 36° C. were limited and not included in the comparison.

[0168] An unexpected shift in the Molar ratio of long heavy chain (LHC) to the short heavy chain (SHC) was seen when cultures were subjected to a temperature shift from 36° C. to 32.5° C. compared to cultures grown at a constant temperature of 36° C., (FIG. 4A Constant temperature of 36° C., Black Bars. Temperature shift from 36° C. to 32.5° C., Gray Bars). This imbalance impacted downstream purification (Protein A affinity chromatography and cation exchange chromatography) and product quality. Culture at the lower temperature (32.5° C.), resulted in a decrease of impurities formed by the short heavy chain (pre-peak 6) and increase of impurities formed by long heavy chain (pre-peak 7) as determined by nrCE. The short heavy chain impurities could be removed by Protein A and CEX chromatography purification (FIG. 4B) while the long heavy chain impurities were difficult to remove by the same purification systems (FIG. 4C). Protein A affinity chromatography (Black Bars) and cation exchange chromatography (Gray Bars).

[0169] This result illustrated that the cell culture temperature could impact the product quality by affecting the ratio of the two heavy chains, which impacted the impurities that were removed by the purification processes. Depending on the property of the impurities, different levels of purity could be achieved. In this example, higher purity was achieved at the higher cell culture temperature.

[0170] The results showed that there was better correlation between the product quality of the IL-2-anti-PD-1 conjugate when the clones were screened and selected at the same temperature regime expected to be encountered by the resulting cell lines. The molar ratio of the long heavy chain and a short heavy chain was found to be influenced by the temperature of the culture, with increased expression of the long heavy chain at lower temperatures. An increase in the ratio of long heavy chain to short heavy chain influenced the formation and type of product-related impurities. The impurities comprising the long heavy chain were found to be surprisingly more difficult to clear in downstream purification operations compared to impurities comprising the short heavy chain. This altered ratio of the long and short heavy chains had an impact on the purification, activity, product quality, as well as the robustness of the manufacturing process as a whole.

### Example 2

[0171] This experiment looked at the effect of temperature during clone selection and the impact on product quality at a transcriptional level for an asymmetric bispecific antibody, Bispecific A, comprising two heavy chains, a “long heavy chain” having the longer amino acid sequence of the pair and “short heavy chain” having the shorter amino acid sequence.

### Fed Batch Shaker Culture

[0172] A clone expressing a bispecific antibody (Bispecific A) was selected from a group of clones from the initial clonal cell screening, (Clone 1). A 10-day fed-batch clone screen was conducted in shake flasks to study the transcript and protein response during cell culture of the clone in a screening protocol comparing the performance of the clone when cultured at a constant temperature (36° C.) compared to culture with a temperature shift (36° C. to 32.5° C.).

[0173] A IL shake flask with a 250ml working volume of serum free, chemically defined culture medium was initiated. The flask was inoculated at 8×10⁵ cells/ml. The shake flask was maintained at 36° C., 5% CO₂, 160 rpm, for seven days and fed on days 3 and 6, at 7% of post-inoculation volume.

[0174] On day 7, the culture was split into two 250 ml shake flasks with a 60 ml working volume of serum free, chemically defined culture medium. One flask was maintained at 36° C., the culture temperature of the second flask was lowered to 32.5° C. Both flasks were cultured at 5% CO₂, agitation at 160 rpm, until day 10. The cultures were fed on day 8 at 7% of post-inoculation volume. Analytical measurements were taken throughout the 10-day culture, as described in the Example above. Integral viable cell density (IVCD) was measured at harvest using a Nova CDV (Nova Biomedical). Titer was measured at harvest using HPLC analysis. The transcript ratio was determined using ddPCR according to the manufacturer's recommendations (DROPLET DIGITAL™ PCR (ddPCR™) system (Bio Rad, Hercules, CA)). The molar ratio of long heavy chain to short heavy chain was determined by rCE-SDS.

[0175] An increase of molar ratio of long heavy chain (LHC) to short heavy chain (SHC) was seen in the sample that was temperature shifted to 32.5° C. which indicated preferential expression of the long heavy chain relative to the short heavy chain at the lower temperature, FIG. 5A, 36° C. (black bar), 32.5° C. (gray bar). This correlated with a decrease of high molecular weight (% HMW) as determined by SEC in the sample that was cultured at 36° C. (FIG. 5B) and an increase of % LMW as determined by SEC in the temperature shifted sample, see FIG. 5C. The HMW impurities were formed by the short heavy chain and the LMW impurities were formed by the long heavy chain. The integral viable cell density was relatively unchanged and the titer was similar between the two culture conditions. The transcript ratio of long heavy chain to short heavy chain also increased at lower temperature.

### Mock Perfusion Culture

[0176] Two clones (Clone 2 and Clone 3) expressing Bispecific A were selected from a group of clones from the initial clonal cell screening and tested in a small-scale mock perfusion culture to study the transcript and protein response time versus temperature change in a culture process that mimics a high cell density perfusion culture in a bioreactor. The clones were cultured at a constant temperature (36° C.) and with a temperature shift (36° C. to 32.5° C.).

[0177] Two 24 deep well plates were inoculated with 200×10⁵ cells/ml/well for each of the clones. The plates were incubated at 36° C., 5% CO₂ on day 0. On day 1, the temperature was decreased to 32.5° C. for one plate from each clone while the second plate for each clone was kept at 36° C. The plates were harvested on day 3. A daily medium exchange using a serum-free, chemically defined medium was performed to remove spent medium and add fresh medium to mimic a perfusion culture. Analytical measurements were taken each day.

[0178] There was an increase of 9% (Clone 2) and 13% (Clone 3) in the molar ratio of long heavy chain (LHC) to short heavy chain (SHC) at low temperature at 24 hours post-temperature shift from 36° C. to 32.5° C. compared to the cultures held at a constant temperature of 36° C., FIG. 6A (36° C. black bar. 32.5° C. gray bar.). This indicated that there was preferential expression of the long heavy chain relative to the short heavy chain at the lower temperature. The increase in the molar ratio was consistent with increased % LMW which comprised long heavy chain homodimer and monomer impurities, FIG. 6B. The Transcript Ratio is seen in FIG. 11C. Both the cell growth and titer were lower for the clones subjected to the temperature shift.

[0179] As seen in Experiment 1, the molar ratio of the long heavy chain and a short heavy chain of Bispecific 1 was also found to be influenced by the temperature of the culture. An increase in the molar ratio of the long heavy chain to short heavy chain was consistent with the formation of increased impurities comprising the long heavy chain at lower temperatures.

### Example 3

[0180] This experiment looked at the effect of temperature during clone selection and the impact on product quality at a transcriptional level for an asymmetric bispecific antibody, Bispecific C. Bispecific C has two heavy chains, a “long heavy chain” having the longer amino acid sequence and a “short heavy chain” having the shorter amino acid sequence.

### Fed-Batch Shake Flask Culture

[0181] Three clones (Clone 1, Clone 2, and Clone 3) were selected from the initial clone screening of Bispecific B. A 10-day fed-batch temperature study was conducted in shake flasks, as described in Example 2 above, to determine the transcript and protein response of the clonal cells in a process at a constant temperature of 36° C. and in a process that included a temperature shift from 36° C. to 32.5° C.

[0182] One IL shake flask (Corning, Corning, NY) with 250ml working volume of serum free, chemically defined culture medium was initiated for each clone. Each flask was inoculated at 8×10⁵ cells/ml on day 0. The shake flasks were maintained at 36° C., 5% CO₂, 160 rpm, for seven days and fed on days 3 and 6, at 7% of post-inoculation volume.

[0183] On day 7, each flask was split into two flasks with a 60 ml working volume of serum free, chemically defined culture medium. One flask was maintained at 36° C., the second flask was maintained at 32.5° C. Both were cultured at 5% CO₂, agitation at 160 rpm, until day 10. The cultures were fed on day 8 at 7% of post-inoculation volume. Analytical measurements were taken throughout the 10-day culture.

[0184] The molar ratio of the long heavy chain to the short heavy chain increased at the lower temperature which was an indication of preferential expression of the long heavy chain relative to the short heavy chain, see FIG. 7A (36° C. black bars, 32.5° C. gray bars.). This was consistent with increased % HMW2 which comprised long heavy chain homodimer impurities, (FIG. 7B) and decreased % LMW1 which comprised short heavy chain homodimer impurities, (FIG. 7C). The transcription ratio is seen in FIG. 7C. A similar titer was observed between the two temperature regimes. There were small differences (10%) in integral viable cell density (IVCD) between the two temperature regimes.

### Mock Perfusion Culture

[0185] Bispecific B clones 2 and 3 were also tested in a small-scale mock perfusion culture to study the transcript and protein response time versus temperature change in a culture process that mimics high cell density perfusion culture in a bioreactor, as described above.

[0186] Two 24 well deep well plates were inoculated with 200×10⁵ cells/ml/well for each of Clones 2 and 3 and incubated at 36° C., 5% CO₂ on day 0. On day 1, the temperature for one plate for each clone was decreased to 32.5° C. while the other plate was maintained at 36° C. On day 3 the plates were harvested. A serum-free, chemically defined medium was used for the culture. A daily medium exchange was performed to remove spent medium and add fresh medium. Analytical measurements were taken each day, as described in the Examples above.

[0187] The molar ratio of long heavy chain to short heavy chain increased by 17% for Clone 2 and 25% for Clone 3 at 24 hours post-temperature shift from 36° C. to 32.5° C. compared to constant temperature at 36° C., See FIG. 8A (36° C. black bars, 32.5° C. gray bars.). This indicated preferential expression of the long heavy chain relative to the short heavy chain at the lower temperature. The increase in the molar ratio was consistent with increased % HMW2, as determined by SEC and decreased % LMW1, as determined by SEC, Sec FIGS. 8B and C. The HMW2 impurity comprised the long heavy chain homodimer and the LMW1 impurity comprised the short heavy chain homodimer. Slightly lower titer was seen at 32.5° C. for both clones on day 2.

[0188] As seen in Experiments 1 and 2, the molar ratio of the long heavy chain and a short heavy chain of Bispecific 2 was also found to be influenced by the temperature of the culture. An increase in the molar ratio of the long heavy chain to short heavy chain was consistent with the formation of increased impurities comprising the long heavy chain at lower temperatures.

[0189] As demonstrated in the experiments, the expression of the long heavy chain of asymmetric multispecific proteins was influenced by temperature, as shown by the increase in molar ratio of the expression of long heavy chain to short heavy chain at lower temperatures. The change in the ratio had an impact on the formation of product-related impurities which influenced the difficulty in separate them from the desired product. Impurities comprising the long heavy chain were found to be surprisingly more difficult to clear in downstream purification operations compared to impurities comprising the short heavy chain. Using temperature as a lever to balance the expression long and short heavy chains has a positive impact on the purification, activity, and product quality of asymmetric proteins.

### Example 4

[0190] These experiments provide a method to control cell growth on a nanofluidic chip through temperature shift to extend culture duration and measurement of protein secretion levels and to minimize the risks of cell cross contamination during export procedure executed under reduced temperature settings. Single cells expressing either a monoclonal or multispecific antibody were deposited on a nanofluidic chip and subjected to a static temperature culture mode where the same temperature was maintained for the duration of the culture or a biphasic culture mode where after an initial incubation at a first temperature condition, a temperature shift (lowering the temperature) was applied. The temperature reduction led to growth inhibition, preventing cell overgrowth therefore reducing cell-cross contamination risks and enabled long-term culture, while altering recombinant protein production profiles. The effects of static and shifted temperature on the recombinant protein productivity were analyzed and used to aid early clone selection.

[0191] CHO cell lines were generated by transfecting a CHO host with plasmid DNA encoding a monoclonal or multispecific antibody. Following transfection, stably expressing pool populations were generated through repeated passaging in selective medium, where MSX selection stringency was also applied, until the cells reached above 90% viability and maintained consistent doubling times.

[0192] Throughout the process, the cells were cultured in either, T-175 flasks (Corning, Corning, NY), or 50 mL spin tubes (TPP, Trasadingen, Switzerland) in selective growth media with MSX selection stringency at 36° C., 5% CO₂ and 85% humidity. Cells were maintained by passaging multiple times a week at a target seed density.

### Static Single Temperature Culture (Control)

[0193] A CHO cell line was single cell loaded on OptoSelect™ chips (Design 1750. Berkeley Lights. Emeryville. CA) using the Beacon Instrument (Berkeley Lights, Emeryville, CA). OptoElectroPositioning (OEP™), localized electric field gradient settings and scripts for loading and exporting cells were provided by the manufacturer. Cells were cultured on the OptoSelect™ chips at 36° C. for up to 6 days using proprietary growth media and manufacturer recommended settings. Repeated imaging and cell counting were performed using the integrated 4× microscope and camera on the Beacon instrument. Evidence of clonal derivation was achieved by image of a single cell in a NanoPen™ chamber (0.0481 mm² area, and 1.70 nL volume). Secretion assays were performed using the Spotlight™ Human Fc Assay (Berkeley Lights, Emeryville, CA) with supplied method scripts and assay analyzer software (Cell Analysis Suite, Build 30552). Selected pens were exported using OEP™ settings to move cells out of the chambers followed by flushing off the chip and collecting into a 96-well microtiter plate prefilled with proprietary single cell cloning media. Clonally derived cell lines were recovered after export through culture in 96-well plates (Corning, Corning, NY) which were maintained at 36° C. 5% CO₂, 85% relative humidity. The cells were monitored for growth through repeated imaging using CellMetric imaging system.

### Static Single Temperature Culture With Temperature Shift Implemented During Export Procedure

[0194] A CHO cell line was single cell loaded on OptoSelect™ chips (Design 1750, Berkeley Lights, Emeryville, CA) using the Beacon Instrument (Berkeley Lights, Emeryville, CA). OptoElectroPositioning settings and scripts for loading and exporting cells were provided by the manufacturer. Cells were cultured on the OptoSelect™ chips at 36° C. for up to day 4 using proprietary growth media and manufacturer recommended settings. On day 4 during export procedure the temperature was shifted to 32° C. and maintained until the end of export procedure. A static culture at 36° C. was maintained for the entire 4-day culture period. Scripts for exporting were provided by the manufacturer and modified where the export procedure was executed with temperature shift settings at 32° C. Repeated imaging and cell counting were performed using the integrated 4X microscope and camera on the Beacon instrument. Evidence of clonal derivation was achieved by image of a single cell in a NanoPen™ chamber (0.0481 mm² area, and 1.70 nL volume). Secretion assays were performed using the Spotlight™ Human Fc Assay (Berkeley Lights, Emeryville, CA) with supplied method scripts and assay analyzer software (Cell Analysis Suite, Build 30552). Selected chambers were exported using OEP™ settings to move cells out of pens followed by flushing off the chip and collecting the cells into a 96-well microtiter plate prefilled with proprietary single cell cloning media.

### Temperature Shift Culture

[0195] A CHO cell line was single cell loaded on OptoSelect™ chips (Design 1750, Berkeley Lights, Emeryville, CA) using the Beacon Instrument (Berkeley Lights, Emeryville, CA). OptoElectroPositioning settings and scripts for loading and exporting cells were provided by the manufacturer Cells were cultured on the OptoSelect™ chips at 36° C. until Day 3, 4 or 5 (as indicated) using proprietary growth media and manufacturer recommended settings. A temperature shift to 32° C. or 32.5° C. was applied on Day 3, 4 or 5 and the culture was maintained at the lower temperature until Day 7 or 8. Scripts for exporting were provided by the manufacturer where the export procedure was executed at either manufacturer recommended settings or with temperature shift settings of 32° C. Repeated imaging and cell counting were performed using the integrated 4× microscope and camera on the Beacon instrument. Evidence of clonal derivation was achieved by image of a single cell in a NanoPen™ chamber (0.0481 mm² area, and 1.70 nL volume). Secretion assays were performed using the Spotlight™ Human Fc Assay (Berkeley Lights, Emeryville, CA) with supplied method scripts and assay analyzer software (Cell Analysis Suite, Build 30552). Selected chambers were exported using OEP™ to move cells out of chambers followed by flushing off the chip and collecting the cells into a 96-well microtiter plate prefilled with proprietary single cell cloning media.

### Results

[0196] FIG. 9 shows that temperature shift implemented during on chip culture results in growth inhibition and allows for long-term culture. (A) Representative brightfield NanoPen™ chamber images collected throughout experiment duration on Berkeley Lights Bacon platform, where single cells expressing monoclonal antibody were loaded on a chip into individual chambers and the chip was cultured for 6 days at 36° C. The cell counts generated by the instrument software are displayed below each timepoint. Cell population on day 6 occupied the majority of the chamber content and expanded close to the neck area of the chamber, preventing reliable secretion assessment through Spotlight™ Human Fc assay and creating high risk of cross contamination during potential export procedure. (B) Representative brightfield chamber images collected throughout experiment duration on Berkeley Lights Bacon platform, where single cells expressing monoclonal antibody were loaded on a chip into individual chambers and the chip was cultured for 3 days at 36° C. and temperature was subsequently reduced to 32° C. for the remaining experiment duration. The cell counts generated by the instrument software are displayed below each timepoint. Temperature shift implemented from Day 4 resulted in growth inhibition and prevented cell expanding above the maximum recommended height of the chamber. (C) Average doubling time (top panel) and average number of cells per chamber (bottom panel) measured on each day throughout experiment duration. Implementing temperature shift from Day 4 resulted in growth inhibition manifested by increased average doubling time and decreased average cell counts when compared to the control condition.

[0197] FIG. 10 Shows that implementing temperature shift during a standard cell line development (CLD) workflow on the Berkeley Light Beacon platform alters monoclonal antibody production profiles. (A) Schematic representation of standard Cell Line Development cloning workflow on the Beacon platform (left panel) and Cell Line Development cloning workflow with temperature shift (right panel) implemented in B and C. (B) Normalized secretion score data corresponding to Spotlight™ Human Fc assay conducted before temperature shift on Day 4 (left panel) and after temperature shift on Day 6 (right panel). Cell secretion profiles measured after temperature shift showed more diverse distribution allowing better distinction of highly producing clones form poorly secreting cell lines. (C) Brightfield and Spotlight™ Human Fc Assay fluorescent images collected throughout experiment duration on Berkeley Lights Bacon platform corresponding to two clonally derived cell lines expressing monoclonal antibody where CLD workflow with temperature shift was implemented. The cell counts generated by the instrument software and normalized Secretion score are displayed below each timepoint. Incubation in decreased temperature conditions resulted in growth arrest for both clones. While both cell lines demonstrated comparable secretion profiles on Day 4 of the workflow. Clone 1 but not Clone 2 displayed increased secretion levels in response to temperature shift.

[0198] FIG. 11 Shows that implementing temperature shift during CLD workflow on the Berkeley Light Beacon platform achieves growth inhibition and alters recombinant protein production profiles for cell lines expressing IgG4 monoclonal antibodies and multispecific antibody formats. (A)(D) Average doubling time (top panel) and average number of cells per chamber (bottom panel) measured on each day throughout experiment duration for clonally derived cell lines expressing IgG4 monoclonal antibody and multispecific antibody, respectively. Temperature settings for each timepoint of the experiment are outlined on the top of the graph. Implementing temperature shift from Day 4 or Day 3, respectively, resulted in growth inhibition measured by increased doubling time and decreased cell counts for both IgG4 and multispecific antibody expressing cell lines. (B)(E) Representative brightfield chamber images collected throughout experiment duration on Berkeley Lights Bacon platform of clonally derived cell lines expressing monoclonal antibody or multispecific antibody, respectively. The cell counts generated by the instrument software are displayed below each timepoint. (C)(F) Spotlight™ Human Fc Assay score data corresponding to Day 4 and Day 8 or Day 7 timepoints, respectively. Secretion profiles achieved after prolonged incubation in decreased temperature showed more diverse distribution allowing better distinction of highly producing clones form poorly secreting cell lines.

[0199] FIG. 12 Shows that export procedure conducted at 32° C. temperature results in similar clone recovery when compared to export executed at 36° C. per standard CLD workflow. (A)(B) Top panel: schematic representation of standard Cell Line Development cloning workflow on the Beacon platform and Cell Line Development cloning workflow with temperature shift implemented during export process, respectively. Bottom panel: representative images of 96 well export plates acquired 18 days after export procedure showing comparable clone recovery efficiency regardless of export temperature implemented at the single cell cloning stage.

### CONCLUSION

[0200] We explored alternative Cell Line Development workflow conditions on Berkeley Lights technology platform to better control for cell growth, minimize risks associated with cell cross-contamination during the export procedure, achieve higher secretion levels and improve early clone selection. We demonstrated that temperature shift introduced after Day 3 during CLD workflow results if lower growth and extended cell doubling times which enabled long term culture. Growth inhibition at lower temperatures can be leveraged during export procedure as dividing cells that may reside near chamber entry/exit can potentially escape into the channel area and cross-contaminate fluidic paths and consequently compromise the export purity. We provide evidence that implementing lower temperature during export process does not impact clone recovery during clone expansion at 96 well plate stage. Furthermore, implementing temperature shift allows to conduct secretion assays at later timepoints, and better discriminate between highly expressing clones and eliminate poorly performing cell lines. Finally, our data indicates that culturing under lower temperatures can alter recombinant protein secretion profiles that can potentially be leveraged for identifying clones with unique phenotypes.

The application's sequence listing, which the Patent Office published only in electronic form, follows.

SEQUENCE LISTING (561 sequences)

SEQ ID NO: 1 - protein, 133 aa, Artificial Sequence a [sequence omitted]

SEQ ID NO: 2 - protein, 133 aa, Artificial Sequence
  Synthetic Polypeptide
  MISC_FEATURE (5)..(5): Xaa is any amino acid
  MISC_FEATURE (8)..(9): Xaa is any amino acid
  MISC_FEATURE (11)..(16): Xaa is any amino acid
  MISC_FEATURE (19)..(19): XaXaa is any amino acid
  MISC_FEATURE (23)..(23): Xaa is any amino acid
  MISC_FEATURE (65)..(66): Xaa is any amino acid
  MISC_FEATURE (68)..(73): Xaa is any amino acid
  MISC_FEATURE (75)..(80): Xaa is any amino acid
  MISC_FEATURE (109)..(110): Xaa is any amino acid
  MISC_FEATURE (112)..(113): Xaa is any amino acid
  MISC_FEATURE (116)..(117): Xaa is any amino acid
  MISC_FEATURE (119)..(120): Xaa is any amino acid
  MISC_FEATURE (123)..(123): Xaa is any amino acid
QGQDXHMXXMXXXXXXVDXLKNXVNDLVPEFLPAPEDVETNCEWSAFSCFQKAQLKSANTGNNEXXIXXXXXXLXXXXXXTNAGRRQKHRLTCPSCDSYEKKPPKEFLXXFXXLLXXMXXQHXSSRTHGSEDS

SEQ ID NO: 3 - protein, 133 aa, Artificial Sequence
  Synthetic Polypeptide
  MISC_FEATURE (5)..(5): Xaa is any amino acid
QGQDXHMIRMRQLIDIVDQLKNYVNDLVPEFLPAPEDVETNCEWSAFSCFQKAQLKSANTGNNERIINVSIKKLKRKPPSTNAGRRQKHRLTCPSCDSYEKKPPKEFLERFKSLLQKMIHQHLSSRTHGSEDS

SEQ ID NO: 4 - protein, 133 aa, Artificial Sequence
  Synthetic Polypeptide
  MISC_FEATURE (8)..(8): Xaa is any amino acid
QGQDRHMXRMRQLIDIVDQLKNYVNDLVPEFLPAPEDVETNCEWSAFSCFQKAQLKSANTGNNERIINVSIKKLKRKPPSTNAGRRQKHRLTCPSCDSYEKKPPKEFLERFKSLLQKMIHQHLSSRTHGSEDS

SEQ ID NO: 5 - protein, 133 aa, Artificial Sequence
  Synthetic Polypeptide
  MISC_FEATURE (9)..(9): Xaa is any amino acid
QGQDRHMIXMRQLIDIVDQLKNYVNDLVPEFLPAPEDVETNCEWSAFSCFQKAQLKSANTGNNERIINVSIKKLKRKPPSTNAGRRQKHRLTCPSCDSYEKKPPKEFLERFKSLLQKMIHQHLSSRTHGSEDS

SEQ ID NO: 6 - protein, 133 aa, Artificial Sequence
  Synthetic Polypeptide
  MISC_FEATURE (11)..(11): Xaa is any amino acid
QGQDRHMIRMXQLIDIVDQLKNYVNDLVPEFLPAPEDVETNCEWSAFSCFQKAQLKSANTGNNERIINVSIKKLKRKPPSTNAGRRQKHRLTCPSCDSYEKKPPKEFLERFKSLLQKMIHQHLSSRTHGSEDS

SEQ ID NO: 7 - protein, 133 aa, Artificial Sequence
  Synthetic Polypeptide
  MISC_FEATURE (12)..(12): Xaa is any amino acid
QGQDRHMIRMRXLIDIVDQLKNYVNDLVPEFLPAPEDVETNCEWSAFSCFQKAQLKSANTGNNERIINVSIKKLKRKPPSTNAGRRQKHRLTCPSCDSYEKKPPKEFLERFKSLLQKMIHQHLSSRTHGSEDS

SEQ ID NO: 8 - protein, 133 aa, Artificial Sequence
  Synthetic Polypeptide
  MISC_FEATURE (13)..(13): Xaa is any amino acid
QGQDRHMIRMRQXIDIVDQLKNYVNDLVPEFLPAPEDVETNCEWSAFSCFQKAQLKSANTGNNERIINVSIKKLKRKPPSTNAGRRQKHRLTCPSCDSYEKKPPKEFLERFKSLLQKMIHQHLSSRTHGSEDS

SEQ ID NO: 9 - protein, 133 aa, Artificial Sequence
  Synthetic Polypeptide
  MISC_FEATURE (14)..(14): Xaa is any amino acid
QGQDRHMIRMRQLXDIVDQLKNYVNDLVPEFLPAPEDVETNCEWSAFSCFQKAQLKSANTGNNERIINVSIKKLKRKPPSTNAGRRQKHRLTCPSCDSYEKKPPKEFLERFKSLLQKMIHQHLSSRTHGSEDS

SEQ ID NO: 10 - protein, 133 aa, Artificial Sequence
  Synthetic Polypeptide
  MISC_FEATURE (15)..(15): Xaa is any amino acid
QGQDRHMIRMRQLIXIVDQLKNYVNDLVPEFLPAPEDVETNCEWSAFSCFQKAQLKSANTGNNERIINVSIKKLKRKPPSTNAGRRQKHRLTCPSCDSYEKKPPKEFLERFKSLLQKMIHQHLSSRTHGSEDS

SEQ ID NO: 11 - protein, 133 aa, Artificial Sequence
  Synthetic Polypeptide
  MISC_FEATURE (16)..(16): Xaa is any amino acid
QGQDRHMIRMRQLIDXVDQLKNYVNDLVPEFLPAPEDVETNCEWSAFSCFQKAQLKSANTGNNERIINVSIKKLKRKPPSTNAGRRQKHRLTCPSCDSYEKKPPKEFLERFKSLLQKMIHQHLSSRTHGSEDS

SEQ ID NO: 12 - protein, 133 aa, Artificial Sequence
  Synthetic Polypeptide
  MISC_FEATURE (19)..(19): Xaa is any amino acid
QGQDRHMIRMRQLIDIVDXLKNYVNDLVPEFLPAPEDVETNCEWSAFSCFQKAQLKSANTGNNERIINVSIKKLKRKPPSTNAGRRQKHRLTCPSCDSYEKKPPKEFLERFKSLLQKMIHQHLSSRTHGSEDS

SEQ ID NO: 13 - protein, 133 aa, Artificial Sequence
  Synthetic Polypeptide
  MISC_FEATURE (23)..(23): Xaa is any amino acid
QGQDRHMIRMRQLIDIVDQLKNXVNDLVPEFLPAPEDVETNCEWSAFSCFQKAQLKSANTGNNERIINVSIKKLKRKPPSTNAGRRQKHRLTCPSCDSYEKKPPKEFLERFKSLLQKMIHQHLSSRTHGSEDS

SEQ ID NO: 14 - protein, 133 aa, Artificial Sequence
  Synthetic Polypeptide
  MISC_FEATURE (65)..(65): Xaa is any amino acid
QGQDRHMIRMRQLIDIVDQLKNYVNDLVPEFLPAPEDVETNCEWSAFSCFQKAQLKSANTGNNEXIINVSIKKLKRKPPSTNAGRRQKHRLTCPSCDSYEKKPPKEFLERFKSLLQKMIHQHLSSRTHGSEDS

SEQ ID NO: 15 - protein, 133 aa, Artificial Sequence
  Synthetic Polypeptide
  MISC_FEATURE (66)..(66): Xaa is any amino acid
QGQDRHMIRMRQLIDIVDQLKNYVNDLVPEFLPAPEDVETNCEWSAFSCFQKAQLKSANTGNNERXINVSIKKLKRKPPSTNAGRRQKHRLTCPSCDSYEKKPPKEFLERFKSLLQKMIHQHLSSRTHGSEDS

SEQ ID NO: 16 - protein, 133 aa, Artificial Sequence
  Synthetic Polypeptide
  MISC_FEATURE (68)..(68): Xaa is any amino acid
QGQDRHMIRMRQLIDIVDQLKNYVNDLVPEFLPAPEDVETNCEWSAFSCFQKAQLKSANTGNNERIIXVSIKKLKRKPPSTNAGRRQKHRLTCPSCDSYEKKPPKEFLERFKSLLQKMIHQHLSSRTHGSEDS

SEQ ID NO: 17 - protein, 133 aa, Artificial Sequence
  Synthetic Polypeptide
  MISC_FEATURE (69)..(69): Xaa is any amino acid
QGQDRHMIRMRQLIDIVDQLKNYVNDLVPEFLPAPEDVETNCEWSAFSCFQKAQLKSANTGNNERIINXSIKKLKRKPPSTNAGRRQKHRLTCPSCDSYEKKPPKEFLERFKSLLQKMIHQHLSSRTHGSEDS

SEQ ID NO: 18 - protein, 133 aa, Artificial Sequence
  Synthetic Polypeptide
  MISC_FEATURE (70)..(70): Xaa is any amino acid
QGQDRHMIRMRQLIDIVDQLKNYVNDLVPEFLPAPEDVETNCEWSAFSCFQKAQLKSANTGNNERIINVXIKKLKRKPPSTNAGRRQKHRLTCPSCDSYEKKPPKEFLERFKSLLQKMIHQHLSSRTHGSEDS

SEQ ID NO: 19 - protein, 133 aa, Artificial Sequence
  Synthetic Polypeptide
  MISC_FEATURE (71)..(71): Xaa is any amino acid
QGQDRHMIRMRQLIDIVDQLKNYVNDLVPEFLPAPEDVETNCEWSAFSCFQKAQLKSANTGNNERIINVSXKKLKRKPPSTNAGRRQKHRLTCPSCDSYEKKPPKEFLERFKSLLQKMIHQHLSSRTHGSEDS

SEQ ID NO: 20 - protein, 133 aa, Artificial Sequence
  Synthetic Polypeptide
  MISC_FEATURE (72)..(72): Xaa is any amino acid
QGQDRHMIRMRQLIDIVDQLKNYVNDLVPEFLPAPEDVETNCEWSAFSCFQKAQLKSANTGNNERIINVSIXKLKRKPPSTNAGRRQKHRLTCPSCDSYEKKPPKEFLERFKSLLQKMIHQHLSSRTHGSEDS

SEQ ID NO: 21 - protein, 133 aa, Artificial Sequence
  Synthetic Polypeptide
  MISC_FEATURE (73)..(73): Xaa is any amino acid
QGQDRHMIRMRQLIDIVDQLKNYVNDLVPEFLPAPEDVETNCEWSAFSCFQKAQLKSANTGNNERIINVSIKXLKRKPPSTNAGRRQKHRLTCPSCDSYEKKPPKEFLERFKSLLQKMIHQHLSSRTHGSEDS

SEQ ID NO: 22 - skipped

SEQ ID NO: 23 - protein, 133 aa, Artificial Sequence
  Synthetic Polypeptide
  MISC_FEATURE (75)..(75): Xaa is any amino acid
QGQDRHMIRMRQLIDIVDQLKNYVNDLVPEFLPAPEDVETNCEWSAFSCFQKAQLKSANTGNNERIINVSIKKLXRKPPSTNAGRRQKHRLTCPSCDSYEKKPPKEFLERFKSLLQKMIHQHLSSRTHGSEDS

SEQ ID NO: 24 - protein, 133 aa, Artificial Sequence
  Synthetic Polypeptide
  MISC_FEATURE (76)..(76): Xaa is any amino acid
QGQDRHMIRMRQLIDIVDQLKNYVNDLVPEFLPAPEDVETNCEWSAFSCFQKAQLKSANTGNNERIINVSIKKLKXKPPSTNAGRRQKHRLTCPSCDSYEKKPPKEFLERFKSLLQKMIHQHLSSRTHGSEDS

SEQ ID NO: 25 - protein, 133 aa, Artificial Sequence
  Synthetic Polypeptide
  MISC_FEATURE (77)..(77): Xaa is any amino acid
QGQDRHMIRMRQLIDIVDQLKNYVNDLVPEFLPAPEDVETNCEWSAFSCFQKAQLKSANTGNNERIINVSIKKLKRXPPSTNAGRRQKHRLTCPSCDSYEKKPPKEFLERFKSLLQKMIHQHLSSRTHGSEDS

SEQ ID NO: 26 - protein, 133 aa, Artificial Sequence
  Synthetic Polypeptide
  MISC_FEATURE (78)..(78): Xaa is any amino acid
QGQDRHMIRMRQLIDIVDQLKNYVNDLVPEFLPAPEDVETNCEWSAFSCFQKAQLKSANTGNNERIINVSIKKLKRKXPSTNAGRRQKHRLTCPSCDSYEKKPPKEFLERFKSLLQKMIHQHLSSRTHGSEDS

SEQ ID NO: 27 - protein, 133 aa, Artificial Sequence
  Synthetic Polypeptide
  MISC_FEATURE (79)..(79): Xaa is any amino acid
QGQDRHMIRMRQLIDIVDQLKNYVNDLVPEFLPAPEDVETNCEWSAFSCFQKAQLKSANTGNNERIINVSIKKLKRKPXSTNAGRRQKHRLTCPSCDSYEKKPPKEFLERFKSLLQKMIHQHLSSRTHGSEDS

SEQ ID NO: 28 - protein, 133 aa, Artificial Sequence
  Synthetic Polypeptide
  MISC_FEATURE (80)..(80): Xaa is any amino acid
QGQDRHMIRMRQLIDIVDQLKNYVNDLVPEFLPAPEDVETNCEWSAFSCFQKAQLKSANTGNNERIINVSIKKLKRKPPXTNAGRRQKHRLTCPSCDSYEKKPPKEFLERFKSLLQKMIHQHLSSRTHGSEDS

SEQ ID NO: 29 - protein, 133 aa, Artificial Sequence
  Synthetic Polypeptide
  MISC_FEATURE (109)..(109): Xaa is any amino acid
QGQDRHMIRMRQLIDIVDQLKNYVNDLVPEFLPAPEDVETNCEWSAFSCFQKAQLKSANTGNNERIINVSIKKLKRKPPSTNAGRRQKHRLTCPSCDSYEKKPPKEFLXRFKSLLQKMIHQHLSSRTHGSEDS

SEQ ID NO: 30 - protein, 133 aa, Artificial Sequence
  Synthetic Polypeptide
  MISC_FEATURE (110)..(110): Xaa is any amino acid
QGQDRHMIRMRQLIDIVDQLKNYVNDLVPEFLPAPEDVETNCEWSAFSCFQKAQLKSANTGNNERIINVSIKKLKRKPPSTNAGRRQKHRLTCPSCDSYEKKPPKEFLEXFKSLLQKMIHQHLSSRTHGSEDS

SEQ ID NO: 31 - protein, 133 aa, Artificial Sequence
  Synthetic Polypeptide
  MISC_FEATURE (112)..(112): Xaa is any amino acid
QGQDRHMIRMRQLIDIVDQLKNYVNDLVPEFLPAPEDVETNCEWSAFSCFQKAQLKSANTGNNERIINVSIKKLKRKPPSTNAGRRQKHRLTCPSCDSYEKKPPKEFLERFXSLLQKMIHQHLSSRTHGSEDS

SEQ ID NO: 32 - protein, 133 aa, Artificial Sequence
  Synthetic Polypeptide
  MISC_FEATURE (113)..(113): Xaa is any amino acid
QGQDRHMIRMRQLIDIVDQLKNYVNDLVPEFLPAPEDVETNCEWSAFSCFQKAQLKSANTGNNERIINVSIKKLKRKPPSTNAGRRQKHRLTCPSCDSYEKKPPKEFLERFKXLLQKMIHQHLSSRTHGSEDS

SEQ ID NO: 33 - protein, 133 aa, Artificial Sequence
  Synthetic Polypeptide
  MISC_FEATURE (116)..(116): Xaa is any amino acid
QGQDRHMIRMRQLIDIVDQLKNYVNDLVPEFLPAPEDVETNCEWSAFSCFQKAQLKSANTGNNERIINVSIKKLKRKPPSTNAGRRQKHRLTCPSCDSYEKKPPKEFLERFKSLLXKMIHQHLSSRTHGSEDS

SEQ ID NO: 34 - protein, 133 aa, Artificial Sequence
  Synthetic Polypeptide
  MISC_FEATURE (117)..(117): Xaa is any amino acid
QGQDRHMIRMRQLIDIVDQLKNYVNDLVPEFLPAPEDVETNCEWSAFSCFQKAQLKSANTGNNERIINVSIKKLKRKPPSTNAGRRQKHRLTCPSCDSYEKKPPKEFLERFKSLLQXMIHQHLSSRTHGSEDS

SEQ ID NO: 35 - protein, 133 aa, Artificial Sequence
  Synthetic Polypeptide
  MISC_FEATURE (119)..(119): Xaa is any amino acid
QGQDRHMIRMRQLIDIVDQLKNYVNDLVPEFLPAPEDVETNCEWSAFSCFQKAQLKSANTGNNERIINVSIKKLKRKPPSTNAGRRQKHRLTCPSCDSYEKKPPKEFLERFKSLLQKMXHQHLSSRTHGSEDS

SEQ ID NO: 36 - protein, 133 aa, Artificial Sequence
  Synthetic Polypeptide
  MISC_FEATURE (120)..(120): Xaa is any amino acid
QGQDRHMIRMRQLIDIVDQLKNYVNDLVPEFLPAPEDVETNCEWSAFSCFQKAQLKSANTGNNERIINVSIKKLKRKPPSTNAGRRQKHRLTCPSCDSYEKKPPKEFLERFKSLLQKMIXQHLSSRTHGSEDS

SEQ ID NO: 37 - protein, 133 aa, Artificial Sequence
  Synthetic Polypeptide
  MISC_FEATURE (123)..(123): Xaa is any amino acid
QGQDRHMIRMRQLIDIVDQLKNYVNDLVPEFLPAPEDVETNCEWSAFSCFQKAQLKSANTGNNERIINVSIKKLKRKPPSTNAGRRQKHRLTCPSCDSYEKKPPKEFLERFKSLLQKMIHQHXSSRTHGSEDS

SEQ ID NO: 38 - protein, 133 aa, Artificial Sequence; identical to SEQ ID NO: 3
  Synthetic Polypeptide
  MISC_FEATURE (5)..(5): Xaa is A, D, E, G, H, I, K, L, M, N, Q, S, T, V or Y

SEQ ID NO: 39 - protein, 133 aa, Artificial Sequence; identical to SEQ ID NO: 4
  Synthetic Polypeptide
  MISC_FEATURE (8)..(8): Xaa is A, D, E, G, N, or S

SEQ ID NO: 40 - protein, 133 aa, Artificial Sequence; identical to SEQ ID NO: 5
  Synthetic Polypeptide
  MISC_FEATURE (9)..(9): Xaa is A, D, E, G, H, I K, L, M, N, Q, S, T, V or Y

SEQ ID NO: 41 - protein, 133 aa, Artificial Sequence; identical to SEQ ID NO: 6
  Synthetic Polypeptide
  MISC_FEATURE (11)..(11): Xaa is D or S

SEQ ID NO: 42 - protein, 133 aa, Artificial Sequence; identical to SEQ ID NO: 7
  Synthetic Polypeptide
  MISC_FEATURE (12)..(12): Xaa is A, D, E, N, S, T, or V

SEQ ID NO: 43 - protein, 133 aa, Artificial Sequence
  Synthetic Polypeptide
QGQDRHMIRMRQDIDIVDQLKNYVNDLVPEFLPAPEDVETNCEWSAFSCFQKAQLKSANTGNNERIINVSIKKLKRKPPSTNAGRRQKHRLTCPSCDSYEKKPPKEFLERFKSLLQKMIHQHLSSRTHGSEDS

SEQ ID NO: 44 - protein, 133 aa, Artificial Sequence; identical to SEQ ID NO: 9
  Synthetic Polypeptide
  MISC_FEATURE (14)..(14): Xaa is A, D or S

SEQ ID NO: 45 - protein, 133 aa, Artificial Sequence; identical to SEQ ID NO: 10
  Synthetic Polypeptide
  MISC_FEATURE (15)..(15): Xaa is A, E, I, M, N, Q, S, T, or  V

SEQ ID NO: 46 - protein, 133 aa, Artificial Sequence; identical to SEQ ID NO: 11
  Synthetic Polypeptide
  MISC_FEATURE (16)..(16): Xaa is D or E

SEQ ID NO: 47 - protein, 133 aa, Artificial Sequence
  Synthetic Polypeptide
QGQDRHMIRMRQLIDIVDDLKNYVNDLVPEFLPAPEDVETNCEWSAFSCFQKAQLKSANTGNNERIINVSIKKLKRKPPSTNAGRRQKHRLTCPSCDSYEKKPPKEFLERFKSLLQKMIHQHLSSRTHGSEDS

SEQ ID NO: 48 - protein, 133 aa, Artificial Sequence
  Synthetic Polypeptide
QGQDRHMIRMRQLIDIVDQLKNDVNDLVPEFLPAPEDVETNCEWSAFSCFQKAQLKSANTGNNERIINVSIKKLKRKPPSTNAGRRQKHRLTCPSCDSYEKKPPKEFLERFKSLLQKMIHQHLSSRTHGSEDS

SEQ ID NO: 49 - protein, 133 aa, Artificial Sequence; identical to SEQ ID NO: 14
  Synthetic Polypeptide
  MISC_FEATURE (65)..(65): Xaa is D, G, or P

SEQ ID NO: 50 - protein, 133 aa, Artificial Sequence; identical to SEQ ID NO: 15
  Synthetic Polypeptide
  MISC_FEATURE (66)..(66): Xaa is D, G, or P

SEQ ID NO: 51 - protein, 133 aa, Artificial Sequence
  Synthetic Polypeptide
QGQDRHMIRMRQLIDIVDQLKNYVNDLVPEFLPAPEDVETNCEWSAFSCFQKAQLKSANTGNNERIIQVSIKKLKRKPPSTNAGRRQKHRLTCPSCDSYEKKPPKEFLERFKSLLQKMIHQHLSSRTHGSEDS

SEQ ID NO: 52 - protein, 133 aa, Artificial Sequence; identical to SEQ ID NO: 17
  Synthetic Polypeptide
  MISC_FEATURE (69)..(69): Xaa is D, G, or P

SEQ ID NO: 53 - protein, 133 aa, Artificial Sequence; identical to SEQ ID NO: 18
  Synthetic Polypeptide
  MISC_FEATURE (70)..(70): Xaa is E, G, P, Y, or T

SEQ ID NO: 54 - protein, 133 aa, Artificial Sequence
  Synthetic Polypeptide
QGQDRHMIRMRQLIDIVDQLKNYVNDLVPEFLPAPEDVETNCEWSAFSCFQKAQLKSANTGNNERIINVSLKKLKRKPPSTNAGRRQKHRLTCPSCDSYEKKPPKEFLERFKSLLQKMIHQHLSSRTHGSEDS

SEQ ID NO: 55 - protein, 133 aa, Artificial Sequence; identical to SEQ ID NO: 20
  Synthetic Polypeptide
  MISC_FEATURE (72)..(72): Xaa is D, G, P, or A

SEQ ID NO: 56 - protein, 133 aa, Artificial Sequence; identical to SEQ ID NO: 21
  Synthetic Polypeptide
  MISC_FEATURE (73)..(73): Xaa is A, D, E, G, H, I, N, P, Q, S or V

SEQ ID NO: 57 - skipped

SEQ ID NO: 58 - protein, 133 aa, Artificial Sequence; identical to SEQ ID NO: 23
  Synthetic Polypeptide
  MISC_FEATURE (75)..(75): Xaa is D, G, or P

SEQ ID NO: 59 - protein, 133 aa, Artificial Sequence; identical to SEQ ID NO: 24
  Synthetic Polypeptide
  MISC_FEATURE (76)..(76): Xaa is A, D, E, G, H, I, K, L, M, N, P, Q, S, T, V, or  Y

SEQ ID NO: 60 - protein, 133 aa, Artificial Sequence; identical to SEQ ID NO: 25
  Synthetic Polypeptide
  MISC_FEATURE (77)..(77): Xaa is D, G, or P

SEQ ID NO: 61 - protein, 133 aa, Artificial Sequence
  Synthetic Polypeptide
QGQDRHMIRMRQLIDIVDQLKNYVNDLVPEFLPAPEDVETNCEWSAFSCFQKAQLKSANTGNNERIINVSIKKLKRKDPSTNAGRRQKHRLTCPSCDSYEKKPPKEFLERFKSLLQKMIHQHLSSRTHGSEDS

SEQ ID NO: 62 - protein, 133 aa, Artificial Sequence
  Synthetic Polypeptide
QGQDRHMIRMRQLIDIVDQLKNYVNDLVPEFLPAPEDVETNCEWSAFSCFQKAQLKSANTGNNERIINVSIKKLKRKPDSTNAGRRQKHRLTCPSCDSYEKKPPKEFLERFKSLLQKMIHQHLSSRTHGSEDS

SEQ ID NO: 63 - protein, 133 aa, Artificial Sequence; identical to SEQ ID NO: 28
  Synthetic Polypeptide
  MISC_FEATURE (80)..(80): Xaa is G or P

SEQ ID NO: 64 - protein, 133 aa, Artificial Sequence
  Synthetic Polypeptide
QGQDRHMIRMRQLIDIVDQLKNYVNDLVPEFLPAPEDVETNCEWSAFSCFQKAQLKSANTGNNERIINVSIKKLKRKPPSTNAGRRQKHRLTCPSCDSYEKKPPKEFLKRFKSLLQKMIHQHLSSRTHGSEDS

SEQ ID NO: 65 - protein, 133 aa, Artificial Sequence
  Synthetic Polypeptide
QGQDRHMIRMRQLIDIVDQLKNYVNDLVPEFLPAPEDVETNCEWSAFSCFQKAQLKSANTGNNERIINVSIKKLKRKPPSTNAGRRQKHRLTCPSCDSYEKKPPKEFLEDFKSLLQKMIHQHLSSRTHGSEDS

SEQ ID NO: 66 - protein, 133 aa, Artificial Sequence
  Synthetic Polypeptide
QGQDRHMIRMRQLIDIVDQLKNYVNDLVPEFLPAPEDVETNCEWSAFSCFQKAQLKSANTGNNERIINVSIKKLKRKPPSTNAGRRQKHRLTCPSCDSYEKKPPKEFLERFDSLLQKMIHQHLSSRTHGSEDS

SEQ ID NO: 67 - protein, 133 aa, Artificial Sequence
  Synthetic Polypeptide
QGQDRHMIRMRQLIDIVDQLKNYVNDLVPEFLPAPEDVETNCEWSAFSCFQKAQLKSANTGNNERIINVSIKKLKRKPPSTNAGRRQKHRLTCPSCDSYEKKPPKEFLERFKKLLQKMIHQHLSSRTHGSEDS

SEQ ID NO: 68 - protein, 133 aa, Artificial Sequence; identical to SEQ ID NO: 33
  Synthetic Polypeptide
  MISC_FEATURE (116)..(116): Xaa is A, D, E, I, K, L, M, N, S, T or V

SEQ ID NO: 69 - protein, 133 aa, Artificial Sequence
  Synthetic Polypeptide
QGQDRHMIRMRQLIDIVDQLKNYVNDLVPEFLPAPEDVETNCEWSAFSCFQKAQLKSANTGNNERIINVSIKKLKRKPPSTNAGRRQKHRLTCPSCDSYEKKPPKEFLERFKSLLQDMIHQHLSSRTHGSEDS

SEQ ID NO: 70 - protein, 133 aa, Artificial Sequence; identical to SEQ ID NO: 35
  Synthetic Polypeptide
  MISC_FEATURE (119)..(119): Xaa is A, D, E, M, N, Q, S or T

SEQ ID NO: 71 - protein, 133 aa, Artificial Sequence
  Synthetic Polypeptide
QGQDRHMIRMRQLIDIVDQLKNYVNDLVPEFLPAPEDVETNCEWSAFSCFQKAQLKSANTGNNERIINVSIKKLKRKPPSTNAGRRQKHRLTCPSCDSYEKKPPKEFLERFKSLLQKMIDQHLSSRTHGSEDS

SEQ ID NO: 72 - protein, 133 aa, Artificial Sequence
  Synthetic Polypeptide
QGQDRHMIRMRQLIDIVDQLKNYVNDLVPEFLPAPEDVETNCEWSAFSCFQKAQLKSANTGNNERIINVSIKKLKRKPPSTNAGRRQKHRLTCPSCDSYEKKPPKEFLERFKSLLQKMIHQHDSSRTHGSEDS

SEQ ID NO: 73 - protein, 133 aa, Artificial Sequence
  Synthetic Polypeptide
QGQDAHMIRMRQLIDIVDQLKNYVNDLVPEFLPAPEDVETNCEWSAFSCFQKAQLKSANTGNNERIINVSIKKLKRKPPSTNAGRRQKHRLTCPSCDSYEKKPPKEFLERFKSLLQKMIHQHLSSRTHGSEDS

SEQ ID NO: 74 - protein, 133 aa, Artificial Sequence
  Synthetic Polypeptide
QGQDDHMIRMRQLIDIVDQLKNYVNDLVPEFLPAPEDVETNCEWSAFSCFQKAQLKSANTGNNERIINVSIKKLKRKPPSTNAGRRQKHRLTCPSCDSYEKKPPKEFLERFKSLLQKMIHQHLSSRTHGSEDS

SEQ ID NO: 75 - protein, 133 aa, Artificial Sequence
  Synthetic Polypeptide
QGQDEHMIRMRQLIDIVDQLKNYVNDLVPEFLPAPEDVETNCEWSAFSCFQKAQLKSANTGNNERIINVSIKKLKRKPPSTNAGRRQKHRLTCPSCDSYEKKPPKEFLERFKSLLQKMIHQHLSSRTHGSEDS

SEQ ID NO: 76 - protein, 133 aa, Artificial Sequence
  Synthetic Polypeptide
QGQDGHMIRMRQLIDIVDQLKNYVNDLVPEFLPAPEDVETNCEWSAFSCFQKAQLKSANTGNNERIINVSIKKLKRKPPSTNAGRRQKHRLTCPSCDSYEKKPPKEFLERFKSLLQKMIHQHLSSRTHGSEDS

SEQ ID NO: 77 - protein, 133 aa, Artificial Sequence
  Synthetic Polypeptide
QGQDHHMIRMRQLIDIVDQLKNYVNDLVPEFLPAPEDVETNCEWSAFSCFQKAQLKSANTGNNERIINVSIKKLKRKPPSTNAGRRQKHRLTCPSCDSYEKKPPKEFLERFKSLLQKMIHQHLSSRTHGSEDS

SEQ ID NO: 78 - protein, 133 aa, Artificial Sequence
  Synthetic Polypeptide
QGQDIHMIRMRQLIDIVDQLKNYVNDLVPEFLPAPEDVETNCEWSAFSCFQKAQLKSANTGNNERIINVSIKKLKRKPPSTNAGRRQKHRLTCPSCDSYEKKPPKEFLERFKSLLQKMIHQHLSSRTHGSEDS

SEQ ID NO: 79 - protein, 133 aa, Artificial Sequence
  Synthetic Polypeptide
QGQDKHMIRMRQLIDIVDQLKNYVNDLVPEFLPAPEDVETNCEWSAFSCFQKAQLKSANTGNNERIINVSIKKLKRKPPSTNAGRRQKHRLTCPSCDSYEKKPPKEFLERFKSLLQKMIHQHLSSRTHGSEDS

SEQ ID NO: 80 - protein, 133 aa, Artificial Sequence
  Synthetic Polypeptide
QGQDLHMIRMRQLIDIVDQLKNYVNDLVPEFLPAPEDVETNCEWSAFSCFQKAQLKSANTGNNERIINVSIKKLKRKPPSTNAGRRQKHRLTCPSCDSYEKKPPKEFLERFKSLLQKMIHQHLSSRTHGSEDS

SEQ ID NO: 81 - protein, 133 aa, Artificial Sequence
  Synthetic Polypeptide
QGQDMHMIRMRQLIDIVDQLKNYVNDLVPEFLPAPEDVETNCEWSAFSCFQKAQLKSANTGNNERIINVSIKKLKRKPPSTNAGRRQKHRLTCPSCDSYEKKPPKEFLERFKSLLQKMIHQHLSSRTHGSEDS

SEQ ID NO: 82 - protein, 133 aa, Artificial Sequence
  Synthetic Polypeptide
QGQDNHMIRMRQLIDIVDQLKNYVNDLVPEFLPAPEDVETNCEWSAFSCFQKAQLKSANTGNNERIINVSIKKLKRKPPSTNAGRRQKHRLTCPSCDSYEKKPPKEFLERFKSLLQKMIHQHLSSRTHGSEDS

SEQ ID NO: 83 - protein, 133 aa, Artificial Sequence
  Synthetic Polypeptide
QGQDQHMIRMRQLIDIVDQLKNYVNDLVPEFLPAPEDVETNCEWSAFSCFQKAQLKSANTGNNERIINVSIKKLKRKPPSTNAGRRQKHRLTCPSCDSYEKKPPKEFLERFKSLLQKMIHQHLSSRTHGSEDS

SEQ ID NO: 84 - protein, 133 aa, Artificial Sequence
  Synthetic Polypeptide
QGQDSHMIRMRQLIDIVDQLKNYVNDLVPEFLPAPEDVETNCEWSAFSCFQKAQLKSANTGNNERIINVSIKKLKRKPPSTNAGRRQKHRLTCPSCDSYEKKPPKEFLERFKSLLQKMIHQHLSSRTHGSEDS

SEQ ID NO: 85 - protein, 133 aa, Artificial Sequence
  Synthetic Polypeptide
QGQDTHMIRMRQLIDIVDQLKNYVNDLVPEFLPAPEDVETNCEWSAFSCFQKAQLKSANTGNNERIINVSIKKLKRKPPSTNAGRRQKHRLTCPSCDSYEKKPPKEFLERFKSLLQKMIHQHLSSRTHGSEDS

SEQ ID NO: 86 - protein, 133 aa, Artificial Sequence
  Synthetic Polypeptide
QGQDVHMIRMRQLIDIVDQLKNYVNDLVPEFLPAPEDVETNCEWSAFSCFQKAQLKSANTGNNERIINVSIKKLKRKPPSTNAGRRQKHRLTCPSCDSYEKKPPKEFLERFKSLLQKMIHQHLSSRTHGSEDS

SEQ ID NO: 87 - protein, 133 aa, Artificial Sequence
  Synthetic Polypeptide
QGQDYHMIRMRQLIDIVDQLKNYVNDLVPEFLPAPEDVETNCEWSAFSCFQKAQLKSANTGNNERIINVSIKKLKRKPPSTNAGRRQKHRLTCPSCDSYEKKPPKEFLERFKSLLQKMIHQHLSSRTHGSEDS

SEQ ID NO: 88 - protein, 133 aa, Artificial Sequence
  Synthetic Polypeptide
QGQDRHMARMRQLIDIVDQLKNYVNDLVPEFLPAPEDVETNCEWSAFSCFQKAQLKSANTGNNERIINVSIKKLKRKPPSTNAGRRQKHRLTCPSCDSYEKKPPKEFLERFKSLLQKMIHQHLSSRTHGSEDS

SEQ ID NO: 89 - protein, 133 aa, Artificial Sequence
  Synthetic Polypeptide
QGQDRHMDRMRQLIDIVDQLKNYVNDLVPEFLPAPEDVETNCEWSAFSCFQKAQLKSANTGNNERIINVSIKKLKRKPPSTNAGRRQKHRLTCPSCDSYEKKPPKEFLERFKSLLQKMIHQHLSSRTHGSEDS

SEQ ID NO: 90 - protein, 133 aa, Artificial Sequence
  Synthetic Polypeptide
QGQDRHMERMRQLIDIVDQLKNYVNDLVPEFLPAPEDVETNCEWSAFSCFQKAQLKSANTGNNERIINVSIKKLKRKPPSTNAGRRQKHRLTCPSCDSYEKKPPKEFLERFKSLLQKMIHQHLSSRTHGSEDS

SEQ ID NO: 91 - protein, 133 aa, Artificial Sequence
  Synthetic Polypeptide
QGQDRHMGRMRQLIDIVDQLKNYVNDLVPEFLPAPEDVETNCEWSAFSCFQKAQLKSANTGNNERIINVSIKKLKRKPPSTNAGRRQKHRLTCPSCDSYEKKPPKEFLERFKSLLQKMIHQHLSSRTHGSEDS

SEQ ID NO: 92 - protein, 133 aa, Artificial Sequence
  Synthetic Polypeptide
QGQDRHMNRMRQLIDIVDQLKNYVNDLVPEFLPAPEDVETNCEWSAFSCFQKAQLKSANTGNNERIINVSIKKLKRKPPSTNAGRRQKHRLTCPSCDSYEKKPPKEFLERFKSLLQKMIHQHLSSRTHGSEDS

SEQ ID NO: 93 - protein, 133 aa, Artificial Sequence
  Synthetic Polypeptide
QGQDRHMSRMRQLIDIVDQLKNYVNDLVPEFLPAPEDVETNCEWSAFSCFQKAQLKSANTGNNERIINVSIKKLKRKPPSTNAGRRQKHRLTCPSCDSYEKKPPKEFLERFKSLLQKMIHQHLSSRTHGSEDS

SEQ ID NO: 94 - protein, 133 aa, Artificial Sequence
  Synthetic Polypeptide
QGQDRHMIAMRQLIDIVDQLKNYVNDLVPEFLPAPEDVETNCEWSAFSCFQKAQLKSANTGNNERIINVSIKKLKRKPPSTNAGRRQKHRLTCPSCDSYEKKPPKEFLERFKSLLQKMIHQHLSSRTHGSEDS

SEQ ID NO: 95 - protein, 133 aa, Artificial Sequence
  Synthetic Polypeptide
QGQDRHMIDMRQLIDIVDQLKNYVNDLVPEFLPAPEDVETNCEWSAFSCFQKAQLKSANTGNNERIINVSIKKLKRKPPSTNAGRRQKHRLTCPSCDSYEKKPPKEFLERFKSLLQKMIHQHLSSRTHGSEDS

SEQ ID NO: 96 - protein, 133 aa, Artificial Sequence
  Synthetic Polypeptide
QGQDRHMIEMRQLIDIVDQLKNYVNDLVPEFLPAPEDVETNCEWSAFSCFQKAQLKSANTGNNERIINVSIKKLKRKPPSTNAGRRQKHRLTCPSCDSYEKKPPKEFLERFKSLLQKMIHQHLSSRTHGSEDS

SEQ ID NO: 97 - protein, 133 aa, Artificial Sequence
  Synthetic Polypeptide
QGQDRHMIGMRQLIDIVDQLKNYVNDLVPEFLPAPEDVETNCEWSAFSCFQKAQLKSANTGNNERIINVSIKKLKRKPPSTNAGRRQKHRLTCPSCDSYEKKPPKEFLERFKSLLQKMIHQHLSSRTHGSEDS

SEQ ID NO: 98 - protein, 133 aa, Artificial Sequence
  Synthetic Polypeptide
QGQDRHMIHMRQLIDIVDQLKNYVNDLVPEFLPAPEDVETNCEWSAFSCFQKAQLKSANTGNNERIINVSIKKLKRKPPSTNAGRRQKHRLTCPSCDSYEKKPPKEFLERFKSLLQKMIHQHLSSRTHGSEDS

SEQ ID NO: 99 - protein, 133 aa, Artificial Sequence
  Synthetic Polypeptide
QGQDRHMIIMRQLIDIVDQLKNYVNDLVPEFLPAPEDVETNCEWSAFSCFQKAQLKSANTGNNERIINVSIKKLKRKPPSTNAGRRQKHRLTCPSCDSYEKKPPKEFLERFKSLLQKMIHQHLSSRTHGSEDS

SEQ ID NO: 100 - protein, 133 aa, Artificial Sequence
  Synthetic Polypeptide
QGQDRHMIKMRQLIDIVDQLKNYVNDLVPEFLPAPEDVETNCEWSAFSCFQKAQLKSANTGNNERIINVSIKKLKRKPPSTNAGRRQKHRLTCPSCDSYEKKPPKEFLERFKSLLQKMIHQHLSSRTHGSEDS

SEQ ID NO: 101 - protein, 133 aa, Artificial Sequence
  Synthetic Polypeptide
QGQDRHMILMRQLIDIVDQLKNYVNDLVPEFLPAPEDVETNCEWSAFSCFQKAQLKSANTGNNERIINVSIKKLKRKPPSTNAGRRQKHRLTCPSCDSYEKKPPKEFLERFKSLLQKMIHQHLSSRTHGSEDS

SEQ ID NO: 102 - protein, 133 aa, Artificial Sequence
  Synthetic Polypeptide
QGQDRHMIMMRQLIDIVDQLKNYVNDLVPEFLPAPEDVETNCEWSAFSCFQKAQLKSANTGNNERIINVSIKKLKRKPPSTNAGRRQKHRLTCPSCDSYEKKPPKEFLERFKSLLQKMIHQHLSSRTHGSEDS

SEQ ID NO: 103 - protein, 133 aa, Artificial Sequence
  Synthetic Polypeptide
QGQDRHMINMRQLIDIVDQLKNYVNDLVPEFLPAPEDVETNCEWSAFSCFQKAQLKSANTGNNERIINVSIKKLKRKPPSTNAGRRQKHRLTCPSCDSYEKKPPKEFLERFKSLLQKMIHQHLSSRTHGSEDS

SEQ ID NO: 104 - protein, 133 aa, Artificial Sequence
  Synthetic Polypeptide
QGQDRHMIQMRQLIDIVDQLKNYVNDLVPEFLPAPEDVETNCEWSAFSCFQKAQLKSANTGNNERIINVSIKKLKRKPPSTNAGRRQKHRLTCPSCDSYEKKPPKEFLERFKSLLQKMIHQHLSSRTHGSEDS

SEQ ID NO: 105 - protein, 133 aa, Artificial Sequence
  Synthetic Polypeptide
QGQDRHMISMRQLIDIVDQLKNYVNDLVPEFLPAPEDVETNCEWSAFSCFQKAQLKSANTGNNERIINVSIKKLKRKPPSTNAGRRQKHRLTCPSCDSYEKKPPKEFLERFKSLLQKMIHQHLSSRTHGSEDS

SEQ ID NO: 106 - protein, 133 aa, Artificial Sequence
  Synthetic Polypeptide
QGQDRHMITMRQLIDIVDQLKNYVNDLVPEFLPAPEDVETNCEWSAFSCFQKAQLKSANTGNNERIINVSIKKLKRKPPSTNAGRRQKHRLTCPSCDSYEKKPPKEFLERFKSLLQKMIHQHLSSRTHGSEDS

SEQ ID NO: 107 - protein, 133 aa, Artificial Sequence
  Synthetic Polypeptide
QGQDRHMIVMRQLIDIVDQLKNYVNDLVPEFLPAPEDVETNCEWSAFSCFQKAQLKSANTGNNERIINVSIKKLKRKPPSTNAGRRQKHRLTCPSCDSYEKKPPKEFLERFKSLLQKMIHQHLSSRTHGSEDS

SEQ ID NO: 108 - protein, 133 aa, Artificial Sequence
  Synthetic Polypeptide
QGQDRHMIYMRQLIDIVDQLKNYVNDLVPEFLPAPEDVETNCEWSAFSCFQKAQLKSANTGNNERIINVSIKKLKRKPPSTNAGRRQKHRLTCPSCDSYEKKPPKEFLERFKSLLQKMIHQHLSSRTHGSEDS

SEQ ID NO: 109 - protein, 133 aa, Artificial Sequence
  Synthetic Polypeptide
QGQDRHMIRMDQLIDIVDQLKNYVNDLVPEFLPAPEDVETNCEWSAFSCFQKAQLKSANTGNNERIINVSIKKLKRKPPSTNAGRRQKHRLTCPSCDSYEKKPPKEFLERFKSLLQKMIHQHLSSRTHGSEDS

SEQ ID NO: 110 - protein, 133 aa, Artificial Sequence
  Synthetic Polypeptide
QGQDRHMIRMSQLIDIVDQLKNYVNDLVPEFLPAPEDVETNCEWSAFSCFQKAQLKSANTGNNERIINVSIKKLKRKPPSTNAGRRQKHRLTCPSCDSYEKKPPKEFLERFKSLLQKMIHQHLSSRTHGSEDS

SEQ ID NO: 111 - protein, 133 aa, Artificial Sequence
  Synthetic Polypeptide
QGQDRHMIRMRALIDIVDQLKNYVNDLVPEFLPAPEDVETNCEWSAFSCFQKAQLKSANTGNNERIINVSIKKLKRKPPSTNAGRRQKHRLTCPSCDSYEKKPPKEFLERFKSLLQKMIHQHLSSRTHGSEDS

SEQ ID NO: 112 - protein, 133 aa, Artificial Sequence; identical to SEQ ID NO: 43
  Synthetic Polypeptide

SEQ ID NO: 113 - skipped

SEQ ID NO: 114 - protein, 133 aa, Artificial Sequence
  Synthetic Polypeptide
QGQDRHMIRMRQLADIVDQLKNYVNDLVPEFLPAPEDVETNCEWSAFSCFQKAQLKSANTGNNERIINVSIKKLKRKPPSTNAGRRQKHRLTCPSCDSYEKKPPKEFLERFKSLLQKMIHQHLSSRTHGSEDS

SEQ ID NO: 115 - protein, 133 aa, Artificial Sequence
  Synthetic Polypeptide
QGQDRHMIRMRQLDDIVDQLKNYVNDLVPEFLPAPEDVETNCEWSAFSCFQKAQLKSANTGNNERIINVSIKKLKRKPPSTNAGRRQKHRLTCPSCDSYEKKPPKEFLERFKSLLQKMIHQHLSSRTHGSEDS

SEQ ID NO: 116 - protein, 133 aa, Artificial Sequence
  Synthetic Polypeptide
QGQDRHMIRMRQLSDIVDQLKNYVNDLVPEFLPAPEDVETNCEWSAFSCFQKAQLKSANTGNNERIINVSIKKLKRKPPSTNAGRRQKHRLTCPSCDSYEKKPPKEFLERFKSLLQKMIHQHLSSRTHGSEDS

SEQ ID NO: 117 - protein, 133 aa, Artificial Sequence
  Synthetic Polypeptide
QGQDRHMIRMRQLIAIVDQLKNYVNDLVPEFLPAPEDVETNCEWSAFSCFQKAQLKSANTGNNERIINVSIKKLKRKPPSTNAGRRQKHRLTCPSCDSYEKKPPKEFLERFKSLLQKMIHQHLSSRTHGSEDS

SEQ ID NO: 118 - protein, 133 aa, Artificial Sequence
  Synthetic Polypeptide
QGQDRHMIRMRQLIEIVDQLKNYVNDLVPEFLPAPEDVETNCEWSAFSCFQKAQLKSANTGNNERIINVSIKKLKRKPPSTNAGRRQKHRLTCPSCDSYEKKPPKEFLERFKSLLQKMIHQHLSSRTHGSEDS

SEQ ID NO: 119 - protein, 133 aa, Artificial Sequence
  Synthetic Polypeptide
QGQDRHMIRMRQLIIIVDQLKNYVNDLVPEFLPAPEDVETNCEWSAFSCFQKAQLKSANTGNNERIINVSIKKLKRKPPSTNAGRRQKHRLTCPSCDSYEKKPPKEFLERFKSLLQKMIHQHLSSRTHGSEDS

SEQ ID NO: 120 - protein, 133 aa, Artificial Sequence
  Synthetic Polypeptide
QGQDRHMIRMRQLIMIVDQLKNYVNDLVPEFLPAPEDVETNCEWSAFSCFQKAQLKSANTGNNERIINVSIKKLKRKPPSTNAGRRQKHRLTCPSCDSYEKKPPKEFLERFKSLLQKMIHQHLSSRTHGSEDS

SEQ ID NO: 121 - protein, 133 aa, Artificial Sequence
  Synthetic Polypeptide
QGQDRHMIRMRQLINIVDQLKNYVNDLVPEFLPAPEDVETNCEWSAFSCFQKAQLKSANTGNNERIINVSIKKLKRKPPSTNAGRRQKHRLTCPSCDSYEKKPPKEFLERFKSLLQKMIHQHLSSRTHGSEDS

SEQ ID NO: 122 - protein, 133 aa, Artificial Sequence
  Synthetic Polypeptide
QGQDRHMIRMRQLIQIVDQLKNYVNDLVPEFLPAPEDVETNCEWSAFSCFQKAQLKSANTGNNERIINVSIKKLKRKPPSTNAGRRQKHRLTCPSCDSYEKKPPKEFLERFKSLLQKMIHQHLSSRTHGSEDS

SEQ ID NO: 123 - protein, 133 aa, Artificial Sequence
  Synthetic Polypeptide
QGQDRHMIRMRQLISIVDQLKNYVNDLVPEFLPAPEDVETNCEWSAFSCFQKAQLKSANTGNNERIINVSIKKLKRKPPSTNAGRRQKHRLTCPSCDSYEKKPPKEFLERFKSLLQKMIHQHLSSRTHGSEDS

SEQ ID NO: 124 - protein, 133 aa, Artificial Sequence
  Synthetic Polypeptide
QGQDRHMIRMRQLIVIVDQLKNYVNDLVPEFLPAPEDVETNCEWSAFSCFQKAQLKSANTGNNERIINVSIKKLKRKPPSTNAGRRQKHRLTCPSCDSYEKKPPKEFLERFKSLLQKMIHQHLSSRTHGSEDS

SEQ ID NO: 125 - protein, 133 aa, Artificial Sequence
  Synthetic Polypeptide
QGQDRHMIRMRQLIDDVDQLKNYVNDLVPEFLPAPEDVETNCEWSAFSCFQKAQLKSANTGNNERIINVSIKKLKRKPPSTNAGRRQKHRLTCPSCDSYEKKPPKEFLERFKSLLQKMIHQHLSSRTHGSEDS

SEQ ID NO: 126 - protein, 133 aa, Artificial Sequence
  Synthetic Polypeptide
QGQDRHMIRMRQLIDEVDQLKNYVNDLVPEFLPAPEDVETNCEWSAFSCFQKAQLKSANTGNNERIINVSIKKLKRKPPSTNAGRRQKHRLTCPSCDSYEKKPPKEFLERFKSLLQKMIHQHLSSRTHGSEDS

SEQ ID NO: 127 - protein, 133 aa, Artificial Sequence
  Synthetic Polypeptide
QGQDRHMIRMRQLIDIVDQLKNYVNDLVPEFLPAPEDVETNCEWSAFSCFQKAQLKSANTGNNEDIINVSIKKLKRKPPSTNAGRRQKHRLTCPSCDSYEKKPPKEFLERFKSLLQKMIHQHLSSRTHGSEDS

SEQ ID NO: 128 - protein, 133 aa, Artificial Sequence
  Synthetic Polypeptide
QGQDRHMIRMRQLIDIVDQLKNYVNDLVPEFLPAPEDVETNCEWSAFSCFQKAQLKSANTGNNEGIINVSIKKLKRKPPSTNAGRRQKHRLTCPSCDSYEKKPPKEFLERFKSLLQKMIHQHLSSRTHGSEDS

SEQ ID NO: 129 - protein, 133 aa, Artificial Sequence
  Synthetic Polypeptide
QGQDRHMIRMRQLIDIVDQLKNYVNDLVPEFLPAPEDVETNCEWSAFSCFQKAQLKSANTGNNEPIINVSIKKLKRKPPSTNAGRRQKHRLTCPSCDSYEKKPPKEFLERFKSLLQKMIHQHLSSRTHGSEDS

SEQ ID NO: 130 - protein, 133 aa, Artificial Sequence
  Synthetic Polypeptide
QGQDRHMIRMRQLIDIVDQLKNYVNDLVPEFLPAPEDVETNCEWSAFSCFQKAQLKSANTGNNERDINVSIKKLKRKPPSTNAGRRQKHRLTCPSCDSYEKKPPKEFLERFKSLLQKMIHQHLSSRTHGSEDS

SEQ ID NO: 131 - protein, 133 aa, Artificial Sequence
  Synthetic Polypeptide
QGQDRHMIRMRQLIDIVDQLKNYVNDLVPEFLPAPEDVETNCEWSAFSCFQKAQLKSANTGNNERGINVSIKKLKRKPPSTNAGRRQKHRLTCPSCDSYEKKPPKEFLERFKSLLQKMIHQHLSSRTHGSEDS

SEQ ID NO: 132 - protein, 133 aa, Artificial Sequence
  Synthetic Polypeptide
QGQDRHMIRMRQLIDIVDQLKNYVNDLVPEFLPAPEDVETNCEWSAFSCFQKAQLKSANTGNNERPINVSIKKLKRKPPSTNAGRRQKHRLTCPSCDSYEKKPPKEFLERFKSLLQKMIHQHLSSRTHGSEDS

SEQ ID NO: 133 - protein, 133 aa, Artificial Sequence
  Synthetic Polypeptide
QGQDRHMIRMRQLIDIVDQLKNYVNDLVPEFLPAPEDVETNCEWSAFSCFQKAQLKSANTGNNERIINDSIKKLKRKPPSTNAGRRQKHRLTCPSCDSYEKKPPKEFLERFKSLLQKMIHQHLSSRTHGSEDS

SEQ ID NO: 134 - protein, 133 aa, Artificial Sequence
  Synthetic Polypeptide
QGQDRHMIRMRQLIDIVDQLKNYVNDLVPEFLPAPEDVETNCEWSAFSCFQKAQLKSANTGNNERIINGSIKKLKRKPPSTNAGRRQKHRLTCPSCDSYEKKPPKEFLERFKSLLQKMIHQHLSSRTHGSEDS

SEQ ID NO: 135 - protein, 133 aa, Artificial Sequence
  Synthetic Polypeptide
QGQDRHMIRMRQLIDIVDQLKNYVNDLVPEFLPAPEDVETNCEWSAFSCFQKAQLKSANTGNNERIINPSIKKLKRKPPSTNAGRRQKHRLTCPSCDSYEKKPPKEFLERFKSLLQKMIHQHLSSRTHGSEDS

SEQ ID NO: 136 - protein, 133 aa, Artificial Sequence
  Synthetic Polypeptide
QGQDRHMIRMRQLIDIVDQLKNYVNDLVPEFLPAPEDVETNCEWSAFSCFQKAQLKSANTGNNERIINVEIKKLKRKPPSTNAGRRQKHRLTCPSCDSYEKKPPKEFLERFKSLLQKMIHQHLSSRTHGSEDS

SEQ ID NO: 137 - protein, 133 aa, Artificial Sequence
  Synthetic Polypeptide
QGQDRHMIRMRQLIDIVDQLKNYVNDLVPEFLPAPEDVETNCEWSAFSCFQKAQLKSANTGNNERIINVGIKKLKRKPPSTNAGRRQKHRLTCPSCDSYEKKPPKEFLERFKSLLQKMIHQHLSSRTHGSEDS

SEQ ID NO: 138 - protein, 133 aa, Artificial Sequence
  Synthetic Polypeptide
QGQDRHMIRMRQLIDIVDQLKNYVNDLVPEFLPAPEDVETNCEWSAFSCFQKAQLKSANTGNNERIINVPIKKLKRKPPSTNAGRRQKHRLTCPSCDSYEKKPPKEFLERFKSLLQKMIHQHLSSRTHGSEDS

SEQ ID NO: 139 - protein, 133 aa, Artificial Sequence
  Synthetic Polypeptide
QGQDRHMIRMRQLIDIVDQLKNYVNDLVPEFLPAPEDVETNCEWSAFSCFQKAQLKSANTGNNERIINVYIKKLKRKPPSTNAGRRQKHRLTCPSCDSYEKKPPKEFLERFKSLLQKMIHQHLSSRTHGSEDS

SEQ ID NO: 140 - protein, 133 aa, Artificial Sequence
  Synthetic Polypeptide
QGQDRHMIRMRQLIDIVDQLKNYVNDLVPEFLPAPEDVETNCEWSAFSCFQKAQLKSANTGNNERIINVTIKKLKRKPPSTNAGRRQKHRLTCPSCDSYEKKPPKEFLERFKSLLQKMIHQHLSSRTHGSEDS

SEQ ID NO: 141 - protein, 133 aa, Artificial Sequence
  Synthetic Polypeptide
QGQDRHMIRMRQLIDIVDQLKNYVNDLVPEFLPAPEDVETNCEWSAFSCFQKAQLKSANTGNNERIINVSIDKLKRKPPSTNAGRRQKHRLTCPSCDSYEKKPPKEFLERFKSLLQKMIHQHLSSRTHGSEDS

SEQ ID NO: 142 - protein, 133 aa, Artificial Sequence
  Synthetic Polypeptide
QGQDRHMIRMRQLIDIVDQLKNYVNDLVPEFLPAPEDVETNCEWSAFSCFQKAQLKSANTGNNERIINVSIGKLKRKPPSTNAGRRQKHRLTCPSCDSYEKKPPKEFLERFKSLLQKMIHQHLSSRTHGSEDS

SEQ ID NO: 143 - protein, 133 aa, Artificial Sequence
  Synthetic Polypeptide
QGQDRHMIRMRQLIDIVDQLKNYVNDLVPEFLPAPEDVETNCEWSAFSCFQKAQLKSANTGNNERIINVSIPKLKRKPPSTNAGRRQKHRLTCPSCDSYEKKPPKEFLERFKSLLQKMIHQHLSSRTHGSEDS

SEQ ID NO: 144 - protein, 133 aa, Artificial Sequence
  Synthetic Polypeptide
QGQDRHMIRMRQLIDIVDQLKNYVNDLVPEFLPAPEDVETNCEWSAFSCFQKAQLKSANTGNNERIINVSIAKLKRKPPSTNAGRRQKHRLTCPSCDSYEKKPPKEFLERFKSLLQKMIHQHLSSRTHGSEDS

SEQ ID NO: 145 - protein, 133 aa, Artificial Sequence
  Synthetic Polypeptide
QGQDRHMIRMRQLIDIVDQLKNYVNDLVPEFLPAPEDVETNCEWSAFSCFQKAQLKSANTGNNERIINVSIKALKRKPPSTNAGRRQKHRLTCPSCDSYEKKPPKEFLERFKSLLQKMIHQHLSSRTHGSEDS

SEQ ID NO: 146 - protein, 133 aa, Artificial Sequence
  Synthetic Polypeptide
QGQDRHMIRMRQLIDIVDQLKNYVNDLVPEFLPAPEDVETNCEWSAFSCFQKAQLKSANTGNNERIINVSIKDLKRKPPSTNAGRRQKHRLTCPSCDSYEKKPPKEFLERFKSLLQKMIHQHLSSRTHGSEDS

SEQ ID NO: 147 - protein, 133 aa, Artificial Sequence
  Synthetic Polypeptide
QGQDRHMIRMRQLIDIVDQLKNYVNDLVPEFLPAPEDVETNCEWSAFSCFQKAQLKSANTGNNERIINVSIKELKRKPPSTNAGRRQKHRLTCPSCDSYEKKPPKEFLERFKSLLQKMIHQHLSSRTHGSEDS

SEQ ID NO: 148 - protein, 133 aa, Artificial Sequence
  Synthetic Polypeptide
QGQDRHMIRMRQLIDIVDQLKNYVNDLVPEFLPAPEDVETNCEWSAFSCFQKAQLKSANTGNNERIINVSIKGLKRKPPSTNAGRRQKHRLTCPSCDSYEKKPPKEFLERFKSLLQKMIHQHLSSRTHGSEDS

SEQ ID NO: 149 - protein, 133 aa, Artificial Sequence
  Synthetic Polypeptide
QGQDRHMIRMRQLIDIVDQLKNYVNDLVPEFLPAPEDVETNCEWSAFSCFQKAQLKSANTGNNERIINVSIKHLKRKPPSTNAGRRQKHRLTCPSCDSYEKKPPKEFLERFKSLLQKMIHQHLSSRTHGSEDS

SEQ ID NO: 150 - protein, 133 aa, Artificial Sequence
  Synthetic Polypeptide
QGQDRHMIRMRQLIDIVDQLKNYVNDLVPEFLPAPEDVETNCEWSAFSCFQKAQLKSANTGNNERIINVSIKILKRKPPSTNAGRRQKHRLTCPSCDSYEKKPPKEFLERFKSLLQKMIHQHLSSRTHGSEDS

SEQ ID NO: 151 - protein, 133 aa, Artificial Sequence
  Synthetic Polypeptide
QGQDRHMIRMRQLIDIVDQLKNYVNDLVPEFLPAPEDVETNCEWSAFSCFQKAQLKSANTGNNERIINVSIKNLKRKPPSTNAGRRQKHRLTCPSCDSYEKKPPKEFLERFKSLLQKMIHQHLSSRTHGSEDS

SEQ ID NO: 152 - protein, 133 aa, Artificial Sequence
  Synthetic Polypeptide
QGQDRHMIRMRQLIDIVDQLKNYVNDLVPEFLPAPEDVETNCEWSAFSCFQKAQLKSANTGNNERIINVSIKPLKRKPPSTNAGRRQKHRLTCPSCDSYEKKPPKEFLERFKSLLQKMIHQHLSSRTHGSEDS

SEQ ID NO: 153 - protein, 133 aa, Artificial Sequence
  Synthetic Polypeptide
QGQDRHMIRMRQLIDIVDQLKNYVNDLVPEFLPAPEDVETNCEWSAFSCFQKAQLKSANTGNNERIINVSIKQLKRKPPSTNAGRRQKHRLTCPSCDSYEKKPPKEFLERFKSLLQKMIHQHLSSRTHGSEDS

SEQ ID NO: 154 - protein, 133 aa, Artificial Sequence
  Synthetic Polypeptide
QGQDRHMIRMRQLIDIVDQLKNYVNDLVPEFLPAPEDVETNCEWSAFSCFQKAQLKSANTGNNERIINVSIKSLKRKPPSTNAGRRQKHRLTCPSCDSYEKKPPKEFLERFKSLLQKMIHQHLSSRTHGSEDS

SEQ ID NO: 155 - protein, 133 aa, Artificial Sequence
  Synthetic Polypeptide
QGQDRHMIRMRQLIDIVDQLKNYVNDLVPEFLPAPEDVETNCEWSAFSCFQKAQLKSANTGNNERIINVSIKVLKRKPPSTNAGRRQKHRLTCPSCDSYEKKPPKEFLERFKSLLQKMIHQHLSSRTHGSEDS

SEQ ID NO: 156 - protein, 133 aa, Artificial Sequence
  Synthetic Polypeptide
QGQDRHMIRMRQLIDIVDQLKNYVNDLVPEFLPAPEDVETNCEWSAFSCFQKAQLKSANTGNNERIINVSIKKLDRKPPSTNAGRRQKHRLTCPSCDSYEKKPPKEFLERFKSLLQKMIHQHLSSRTHGSEDS

SEQ ID NO: 157 - protein, 133 aa, Artificial Sequence
  Synthetic Polypeptide
QGQDRHMIRMRQLIDIVDQLKNYVNDLVPEFLPAPEDVETNCEWSAFSCFQKAQLKSANTGNNERIINVSIKKLGRKPPSTNAGRRQKHRLTCPSCDSYEKKPPKEFLERFKSLLQKMIHQHLSSRTHGSEDS

SEQ ID NO: 158 - protein, 133 aa, Artificial Sequence
  Synthetic Polypeptide
QGQDRHMIRMRQLIDIVDQLKNYVNDLVPEFLPAPEDVETNCEWSAFSCFQKAQLKSANTGNNERIINVSIKKLPRKPPSTNAGRRQKHRLTCPSCDSYEKKPPKEFLERFKSLLQKMIHQHLSSRTHGSEDS

SEQ ID NO: 159 - protein, 133 aa, Artificial Sequence
  Synthetic Polypeptide
QGQDRHMIRMRQLIDIVDQLKNYVNDLVPEFLPAPEDVETNCEWSAFSCFQKAQLKSANTGNNERIINVSIKKLKAKPPSTNAGRRQKHRLTCPSCDSYEKKPPKEFLERFKSLLQKMIHQHLSSRTHGSEDS

SEQ ID NO: 160 - protein, 133 aa, Artificial Sequence
  Synthetic Polypeptide
QGQDRHMIRMRQLIDIVDQLKNYVNDLVPEFLPAPEDVETNCEWSAFSCFQKAQLKSANTGNNERIINVSIKKLKDKPPSTNAGRRQKHRLTCPSCDSYEKKPPKEFLERFKSLLQKMIHQHLSSRTHGSEDS

SEQ ID NO: 161 - protein, 133 aa, Artificial Sequence
  Synthetic Polypeptide
QGQDRHMIRMRQLIDIVDQLKNYVNDLVPEFLPAPEDVETNCEWSAFSCFQKAQLKSANTGNNERIINVSIKKLKEKPPSTNAGRRQKHRLTCPSCDSYEKKPPKEFLERFKSLLQKMIHQHLSSRTHGSEDS

SEQ ID NO: 162 - protein, 133 aa, Artificial Sequence
  Synthetic Polypeptide
QGQDRHMIRMRQLIDIVDQLKNYVNDLVPEFLPAPEDVETNCEWSAFSCFQKAQLKSANTGNNERIINVSIKKLKGKPPSTNAGRRQKHRLTCPSCDSYEKKPPKEFLERFKSLLQKMIHQHLSSRTHGSEDS

SEQ ID NO: 163 - protein, 133 aa, Artificial Sequence
  Synthetic Polypeptide
QGQDRHMIRMRQLIDIVDQLKNYVNDLVPEFLPAPEDVETNCEWSAFSCFQKAQLKSANTGNNERIINVSIKKLKHKPPSTNAGRRQKHRLTCPSCDSYEKKPPKEFLERFKSLLQKMIHQHLSSRTHGSEDS

SEQ ID NO: 164 - protein, 133 aa, Artificial Sequence
  Synthetic Polypeptide
QGQDRHMIRMRQLIDIVDQLKNYVNDLVPEFLPAPEDVETNCEWSAFSCFQKAQLKSANTGNNERIINVSIKKLKIKPPSTNAGRRQKHRLTCPSCDSYEKKPPKEFLERFKSLLQKMIHQHLSSRTHGSEDS

SEQ ID NO: 165 - protein, 133 aa, Artificial Sequence
  Synthetic Polypeptide
QGQDRHMIRMRQLIDIVDQLKNYVNDLVPEFLPAPEDVETNCEWSAFSCFQKAQLKSANTGNNERIINVSIKKLKKKPPSTNAGRRQKHRLTCPSCDSYEKKPPKEFLERFKSLLQKMIHQHLSSRTHGSEDS

SEQ ID NO: 166 - protein, 133 aa, Artificial Sequence
  Synthetic Polypeptide
QGQDRHMIRMRQLIDIVDQLKNYVNDLVPEFLPAPEDVETNCEWSAFSCFQKAQLKSANTGNNERIINVSIKKLKLKPPSTNAGRRQKHRLTCPSCDSYEKKPPKEFLERFKSLLQKMIHQHLSSRTHGSEDS

SEQ ID NO: 167 - protein, 133 aa, Artificial Sequence
  Synthetic Polypeptide
QGQDRHMIRMRQLIDIVDQLKNYVNDLVPEFLPAPEDVETNCEWSAFSCFQKAQLKSANTGNNERIINVSIKKLKMKPPSTNAGRRQKHRLTCPSCDSYEKKPPKEFLERFKSLLQKMIHQHLSSRTHGSEDS

SEQ ID NO: 168 - protein, 133 aa, Artificial Sequence
  Synthetic Polypeptide
QGQDRHMIRMRQLIDIVDQLKNYVNDLVPEFLPAPEDVETNCEWSAFSCFQKAQLKSANTGNNERIINVSIKKLKNKPPSTNAGRRQKHRLTCPSCDSYEKKPPKEFLERFKSLLQKMIHQHLSSRTHGSEDS

SEQ ID NO: 169 - protein, 133 aa, Artificial Sequence
  Synthetic Polypeptide
QGQDRHMIRMRQLIDIVDQLKNYVNDLVPEFLPAPEDVETNCEWSAFSCFQKAQLKSANTGNNERIINVSIKKLKPKPPSTNAGRRQKHRLTCPSCDSYEKKPPKEFLERFKSLLQKMIHQHLSSRTHGSEDS

SEQ ID NO: 170 - protein, 133 aa, Artificial Sequence
  Synthetic Polypeptide
QGQDRHMIRMRQLIDIVDQLKNYVNDLVPEFLPAPEDVETNCEWSAFSCFQKAQLKSANTGNNERIINVSIKKLKQKPPSTNAGRRQKHRLTCPSCDSYEKKPPKEFLERFKSLLQKMIHQHLSSRTHGSEDS

SEQ ID NO: 171 - protein, 133 aa, Artificial Sequence
  Synthetic Polypeptide
QGQDRHMIRMRQLIDIVDQLKNYVNDLVPEFLPAPEDVETNCEWSAFSCFQKAQLKSANTGNNERIINVSIKKLKSKPPSTNAGRRQKHRLTCPSCDSYEKKPPKEFLERFKSLLQKMIHQHLSSRTHGSEDS

SEQ ID NO: 172 - protein, 133 aa, Artificial Sequence
  Synthetic Polypeptide
QGQDRHMIRMRQLIDIVDQLKNYVNDLVPEFLPAPEDVETNCEWSAFSCFQKAQLKSANTGNNERIINVSIKKLKTKPPSTNAGRRQKHRLTCPSCDSYEKKPPKEFLERFKSLLQKMIHQHLSSRTHGSEDS

SEQ ID NO: 173 - protein, 133 aa, Artificial Sequence
  Synthetic Polypeptide
QGQDRHMIRMRQLIDIVDQLKNYVNDLVPEFLPAPEDVETNCEWSAFSCFQKAQLKSANTGNNERIINVSIKKLKVKPPSTNAGRRQKHRLTCPSCDSYEKKPPKEFLERFKSLLQKMIHQHLSSRTHGSEDS

SEQ ID NO: 174 - protein, 133 aa, Artificial Sequence
  Synthetic Polypeptide
QGQDRHMIRMRQLIDIVDQLKNYVNDLVPEFLPAPEDVETNCEWSAFSCFQKAQLKSANTGNNERIINVSIKKLKYKPPSTNAGRRQKHRLTCPSCDSYEKKPPKEFLERFKSLLQKMIHQHLSSRTHGSEDS

SEQ ID NO: 175 - protein, 133 aa, Artificial Sequence
  Synthetic Polypeptide
QGQDRHMIRMRQLIDIVDQLKNYVNDLVPEFLPAPEDVETNCEWSAFSCFQKAQLKSANTGNNERIINVSIKKLKRDPPSTNAGRRQKHRLTCPSCDSYEKKPPKEFLERFKSLLQKMIHQHLSSRTHGSEDS

SEQ ID NO: 176 - protein, 133 aa, Artificial Sequence
  Synthetic Polypeptide
QGQDRHMIRMRQLIDIVDQLKNYVNDLVPEFLPAPEDVETNCEWSAFSCFQKAQLKSANTGNNERIINVSIKKLKRGPPSTNAGRRQKHRLTCPSCDSYEKKPPKEFLERFKSLLQKMIHQHLSSRTHGSEDS

SEQ ID NO: 177 - protein, 133 aa, Artificial Sequence
  Synthetic Polypeptide
QGQDRHMIRMRQLIDIVDQLKNYVNDLVPEFLPAPEDVETNCEWSAFSCFQKAQLKSANTGNNERIINVSIKKLKRPPPSTNAGRRQKHRLTCPSCDSYEKKPPKEFLERFKSLLQKMIHQHLSSRTHGSEDS

SEQ ID NO: 178 - protein, 133 aa, Artificial Sequence
  Synthetic Polypeptide
QGQDRHMIRMRQLIDIVDQLKNYVNDLVPEFLPAPEDVETNCEWSAFSCFQKAQLKSANTGNNERIINVSIKKLKRKPPGTNAGRRQKHRLTCPSCDSYEKKPPKEFLERFKSLLQKMIHQHLSSRTHGSEDS

SEQ ID NO: 179 - protein, 133 aa, Artificial Sequence
  Synthetic Polypeptide
QGQDRHMIRMRQLIDIVDQLKNYVNDLVPEFLPAPEDVETNCEWSAFSCFQKAQLKSANTGNNERIINVSIKKLKRKPPPTNAGRRQKHRLTCPSCDSYEKKPPKEFLERFKSLLQKMIHQHLSSRTHGSEDS

SEQ ID NO: 180 - protein, 133 aa, Artificial Sequence
  Synthetic Polypeptide
QGQDRHMIRMRQLIDIVDQLKNYVNDLVPEFLPAPEDVETNCEWSAFSCFQKAQLKSANTGNNERIINVSIKKLKRKPPSTNAGRRQKHRLTCPSCDSYEKKPPKEFLERFKSLLAKMIHQHLSSRTHGSEDS

SEQ ID NO: 181 - protein, 133 aa, Artificial Sequence
  Synthetic Polypeptide
QGQDRHMIRMRQLIDIVDQLKNYVNDLVPEFLPAPEDVETNCEWSAFSCFQKAQLKSANTGNNERIINVSIKKLKRKPPSTNAGRRQKHRLTCPSCDSYEKKPPKEFLERFKSLLDKMIHQHLSSRTHGSEDS

SEQ ID NO: 182 - protein, 133 aa, Artificial Sequence
  Synthetic Polypeptide
QGQDRHMIRMRQLIDIVDQLKNYVNDLVPEFLPAPEDVETNCEWSAFSCFQKAQLKSANTGNNERIINVSIKKLKRKPPSTNAGRRQKHRLTCPSCDSYEKKPPKEFLERFKSLLEKMIHQHLSSRTHGSEDS

SEQ ID NO: 183 - protein, 133 aa, Artificial Sequence
  Synthetic Polypeptide
QGQDRHMIRMRQLIDIVDQLKNYVNDLVPEFLPAPEDVETNCEWSAFSCFQKAQLKSANTGNNERIINVSIKKLKRKPPSTNAGRRQKHRLTCPSCDSYEKKPPKEFLERFKSLLIKMIHQHLSSRTHGSEDS

SEQ ID NO: 184 - protein, 133 aa, Artificial Sequence
  Synthetic Polypeptide
QGQDRHMIRMRQLIDIVDQLKNYVNDLVPEFLPAPEDVETNCEWSAFSCFQKAQLKSANTGNNERIINVSIKKLKRKPPSTNAGRRQKHRLTCPSCDSYEKKPPKEFLERFKSLLKKMIHQHLSSRTHGSEDS

SEQ ID NO: 185 - protein, 133 aa, Artificial Sequence
  Synthetic Polypeptide
QGQDRHMIRMRQLIDIVDQLKNYVNDLVPEFLPAPEDVETNCEWSAFSCFQKAQLKSANTGNNERIINVSIKKLKRKPPSTNAGRRQKHRLTCPSCDSYEKKPPKEFLERFKSLLLKMIHQHLSSRTHGSEDS

SEQ ID NO: 186 - protein, 133 aa, Artificial Sequence
  Synthetic Polypeptide
QGQDRHMIRMRQLIDIVDQLKNYVNDLVPEFLPAPEDVETNCEWSAFSCFQKAQLKSANTGNNERIINVSIKKLKRKPPSTNAGRRQKHRLTCPSCDSYEKKPPKEFLERFKSLLMKMIHQHLSSRTHGSEDS

SEQ ID NO: 187 - protein, 133 aa, Artificial Sequence
  Synthetic Polypeptide
QGQDRHMIRMRQLIDIVDQLKNYVNDLVPEFLPAPEDVETNCEWSAFSCFQKAQLKSANTGNNERIINVSIKKLKRKPPSTNAGRRQKHRLTCPSCDSYEKKPPKEFLERFKSLLNKMIHQHLSSRTHGSEDS

SEQ ID NO: 188 - protein, 133 aa, Artificial Sequence
  Synthetic Polypeptide
QGQDRHMIRMRQLIDIVDQLKNYVNDLVPEFLPAPEDVETNCEWSAFSCFQKAQLKSANTGNNERIINVSIKKLKRKPPSTNAGRRQKHRLTCPSCDSYEKKPPKEFLERFKSLLSKMIHQHLSSRTHGSEDS

SEQ ID NO: 189 - protein, 133 aa, Artificial Sequence
  Synthetic Polypeptide
QGQDRHMIRMRQLIDIVDQLKNYVNDLVPEFLPAPEDVETNCEWSAFSCFQKAQLKSANTGNNERIINVSIKKLKRKPPSTNAGRRQKHRLTCPSCDSYEKKPPKEFLERFKSLLTKMIHQHLSSRTHGSEDS

SEQ ID NO: 190 - protein, 133 aa, Artificial Sequence
  Synthetic Polypeptide
QGQDRHMIRMRQLIDIVDQLKNYVNDLVPEFLPAPEDVETNCEWSAFSCFQKAQLKSANTGNNERIINVSIKKLKRKPPSTNAGRRQKHRLTCPSCDSYEKKPPKEFLERFKSLLVKMIHQHLSSRTHGSEDS

SEQ ID NO: 191 - protein, 133 aa, Artificial Sequence
  Synthetic Polypeptide
QGQDRHMIRMRQLIDIVDQLKNYVNDLVPEFLPAPEDVETNCEWSAFSCFQKAQLKSANTGNNERIINVSIKKLKRKPPSTNAGRRQKHRLTCPSCDSYEKKPPKEFLERFKSLLQKMAHQHLSSRTHGSEDS

SEQ ID NO: 192 - protein, 133 aa, Artificial Sequence
  Synthetic Polypeptide
QGQDRHMIRMRQLIDIVDQLKNYVNDLVPEFLPAPEDVETNCEWSAFSCFQKAQLKSANTGNNERIINVSIKKLKRKPPSTNAGRRQKHRLTCPSCDSYEKKPPKEFLERFKSLLQKMDHQHLSSRTHGSEDS

SEQ ID NO: 193 - protein, 133 aa, Artificial Sequence
  Synthetic Polypeptide
QGQDRHMIRMRQLIDIVDQLKNYVNDLVPEFLPAPEDVETNCEWSAFSCFQKAQLKSANTGNNERIINVSIKKLKRKPPSTNAGRRQKHRLTCPSCDSYEKKPPKEFLERFKSLLQKMEHQHLSSRTHGSEDS

SEQ ID NO: 194 - protein, 133 aa, Artificial Sequence
  Synthetic Polypeptide
QGQDRHMIRMRQLIDIVDQLKNYVNDLVPEFLPAPEDVETNCEWSAFSCFQKAQLKSANTGNNERIINVSIKKLKRKPPSTNAGRRQKHRLTCPSCDSYEKKPPKEFLERFKSLLQKMMHQHLSSRTHGSEDS

SEQ ID NO: 195 - protein, 133 aa, Artificial Sequence
  Synthetic Polypeptide
QGQDRHMIRMRQLIDIVDQLKNYVNDLVPEFLPAPEDVETNCEWSAFSCFQKAQLKSANTGNNERIINVSIKKLKRKPPSTNAGRRQKHRLTCPSCDSYEKKPPKEFLERFKSLLQKMNHQHLSSRTHGSEDS

SEQ ID NO: 196 - protein, 133 aa, Artificial Sequence
  Synthetic Polypeptide
QGQDRHMIRMRQLIDIVDQLKNYVNDLVPEFLPAPEDVETNCEWSAFSCFQKAQLKSANTGNNERIINVSIKKLKRKPPSTNAGRRQKHRLTCPSCDSYEKKPPKEFLERFKSLLQKMQHQHLSSRTHGSEDS

SEQ ID NO: 197 - protein, 133 aa, Artificial Sequence
  Synthetic Polypeptide
QGQDRHMIRMRQLIDIVDQLKNYVNDLVPEFLPAPEDVETNCEWSAFSCFQKAQLKSANTGNNERIINVSIKKLKRKPPSTNAGRRQKHRLTCPSCDSYEKKPPKEFLERFKSLLQKMSHQHLSSRTHGSEDS

SEQ ID NO: 198 - protein, 133 aa, Artificial Sequence
  Synthetic Polypeptide
QGQDRHMIRMRQLIDIVDQLKNYVNDLVPEFLPAPEDVETNCEWSAFSCFQKAQLKSANTGNNERIINVSIKKLKRKPPSTNAGRRQKHRLTCPSCDSYEKKPPKEFLERFKSLLQKMTHQHLSSRTHGSEDS

SEQ ID NO: 199 - protein, 133 aa, Artificial Sequence
  Synthetic Polypeptide
  MISC_FEATURE (15)..(15): Xaa is any amino acid
  MISC_FEATURE (70)..(70): Xaa is any amino acid
QGQDRHMIRMRQLIXIVDQLKNYVNDLVPEFLPAPEDVETNCEWSAFSCFQKAQLKSANTGNNERIINVXIKKLKRKPPSTNAGRRQKHRLTCPSCDSYEKKPPKEFLERFKSLLQKMIHQHLSSRTHGSEDS

SEQ ID NO: 200 - protein, 133 aa, Artificial Sequence
  Synthetic Polypeptide
  MISC_FEATURE (15)..(15): Xaa is any amino acid
  MISC_FEATURE (71)..(71): Xaa is any amino acid
QGQDRHMIRMRQLIXIVDQLKNYVNDLVPEFLPAPEDVETNCEWSAFSCFQKAQLKSANTGNNERIINVSXKKLKRKPPSTNAGRRQKHRLTCPSCDSYEKKPPKEFLERFKSLLQKMIHQHLSSRTHGSEDS

SEQ ID NO: 201 - protein, 133 aa, Artificial Sequence
  Synthetic Polypeptide
  MISC_FEATURE (15)..(15): Xaa is any amino acid
  MISC_FEATURE (72)..(72): Xaa is any amino acid
QGQDRHMIRMRQLIXIVDQLKNYVNDLVPEFLPAPEDVETNCEWSAFSCFQKAQLKSANTGNNERIINVSIXKLKRKPPSTNAGRRQKHRLTCPSCDSYEKKPPKEFLERFKSLLQKMIHQHLSSRTHGSEDS

SEQ ID NO: 202 - protein, 133 aa, Artificial Sequence
  Synthetic Polypeptide
  MISC_FEATURE (15)..(15): Xaa is any amino acid
  MISC_FEATURE (73)..(73): Xaa is any amino acid
QGQDRHMIRMRQLIXIVDQLKNYVNDLVPEFLPAPEDVETNCEWSAFSCFQKAQLKSANTGNNERIINVSIKXLKRKPPSTNAGRRQKHRLTCPSCDSYEKKPPKEFLERFKSLLQKMIHQHLSSRTHGSEDS

SEQ ID NO: 203 - protein, 133 aa, Artificial Sequence
  Synthetic Polypeptide
  MISC_FEATURE (71)..(71): Xaa is any amino acid
  MISC_FEATURE (73)..(73): Xaa is any amino acid
QGQDRHMIRMRQLIDIVDQLKNYVNDLVPEFLPAPEDVETNCEWSAFSCFQKAQLKSANTGNNERIINVSXKXLKRKPPSTNAGRRQKHRLTCPSCDSYEKKPPKEFLERFKSLLQKMIHQHLSSRTHGSEDS

SEQ ID NO: 204 - protein, 133 aa, Artificial Sequence
  Synthetic Polypeptide
  MISC_FEATURE (72)..(73): Xaa is any amino acid
QGQDRHMIRMRQLIDIVDQLKNYVNDLVPEFLPAPEDVETNCEWSAFSCFQKAQLKSANTGNNERIINVSIXXLKRKPPSTNAGRRQKHRLTCPSCDSYEKKPPKEFLERFKSLLQKMIHQHLSSRTHGSEDS

SEQ ID NO: 205 - protein, 133 aa, Artificial Sequence
  Synthetic Polypeptide
  MISC_FEATURE (70)..(70): Xaa is any amino acid
  MISC_FEATURE (73)..(73): Xaa is any amino acid
QGQDRHMIRMRQLIDIVDQLKNYVNDLVPEFLPAPEDVETNCEWSAFSCFQKAQLKSANTGNNERIINVXIKXLKRKPPSTNAGRRQKHRLTCPSCDSYEKKPPKEFLERFKSLLQKMIHQHLSSRTHGSEDS

SEQ ID NO: 206 - protein, 133 aa, Artificial Sequence
  Synthetic Polypeptide
  MISC_FEATURE (71)..(71): Xaa is any amino acid
  MISC_FEATURE (76)..(76): Xaa is any amino acid
QGQDRHMIRMRQLIDIVDQLKNYVNDLVPEFLPAPEDVETNCEWSAFSCFQKAQLKSANTGNNERIINVSXKKLKXKPPSTNAGRRQKHRLTCPSCDSYEKKPPKEFLERFKSLLQKMIHQHLSSRTHGSEDS

SEQ ID NO: 207 - protein, 133 aa, Artificial Sequence
  Synthetic Polypeptide
  MISC_FEATURE (72)..(72): Xaa is any amino acid
  MISC_FEATURE (76)..(76): Xaa is any amino acid
QGQDRHMIRMRQLIDIVDQLKNYVNDLVPEFLPAPEDVETNCEWSAFSCFQKAQLKSANTGNNERIINVSIXKLKXKPPSTNAGRRQKHRLTCPSCDSYEKKPPKEFLERFKSLLQKMIHQHLSSRTHGSEDS

SEQ ID NO: 208 - protein, 133 aa, Artificial Sequence
  Synthetic Polypeptide
  MISC_FEATURE (73)..(73): Xaa is any amino acid
  MISC_FEATURE (76)..(76): Xaa is any amino acid
QGQDRHMIRMRQLIDIVDQLKNYVNDLVPEFLPAPEDVETNCEWSAFSCFQKAQLKSANTGNNERIINVSIKXLKXKPPSTNAGRRQKHRLTCPSCDSYEKKPPKEFLERFKSLLQKMIHQHLSSRTHGSEDS

SEQ ID NO: 209 - skipped

SEQ ID NO: 210 - protein, 133 aa, Artificial Sequence
  Synthetic Polypeptide
  MISC_FEATURE (5)..(5): Xaa is any amino acid
  MISC_FEATURE (76)..(76): Xaa is any amino acid
QGQDXHMIRMRQLIDIVDQLKNYVNDLVPEFLPAPEDVETNCEWSAFSCFQKAQLKSANTGNNERIINVSIKKLKXKPPSTNAGRRQKHRLTCPSCDSYEKKPPKEFLERFKSLLQKMIHQHLSSRTHGSEDS

SEQ ID NO: 211 - protein, 133 aa, Artificial Sequence
  Synthetic Polypeptide
  MISC_FEATURE (9)..(9): Xaa is any amino acid
  MISC_FEATURE (76)..(76): Xaa is any amino acid
QGQDRHMIXMRQLIDIVDQLKNYVNDLVPEFLPAPEDVETNCEWSAFSCFQKAQLKSANTGNNERIINVSIKKLKXKPPSTNAGRRQKHRLTCPSCDSYEKKPPKEFLERFKSLLQKMIHQHLSSRTHGSEDS

SEQ ID NO: 212 - protein, 133 aa, Artificial Sequence
  Synthetic Polypeptide
  MISC_FEATURE (70)..(70): Xaa is any amino acid
  MISC_FEATURE (76)..(76): Xaa is any amino acid
QGQDRHMIRMRQLIDIVDQLKNYVNDLVPEFLPAPEDVETNCEWSAFSCFQKAQLKSANTGNNERIINVXIKKLKXKPPSTNAGRRQKHRLTCPSCDSYEKKPPKEFLERFKSLLQKMIHQHLSSRTHGSEDS

SEQ ID NO: 213 - protein, 133 aa, Artificial Sequence
  Synthetic Polypeptide
QGQDRHMIRMRQLINIVDQLKNYVNDLVPEFLPAPEDVETNCEWSAFSCFQKAQLKSANTGNNERIINVTIKKLKRKPPSTNAGRRQKHRLTCPSCDSYEKKPPKEFLERFKSLLQKMIHQHLSSRTHGSEDS

SEQ ID NO: 214 - protein, 133 aa, Artificial Sequence
  Synthetic Polypeptide
QGQDRHMIRMRQLINIVDQLKNYVNDLVPEFLPAPEDVETNCEWSAFSCFQKAQLKSANTGNNERIINVSLKKLKRKPPSTNAGRRQKHRLTCPSCDSYEKKPPKEFLERFKSLLQKMIHQHLSSRTHGSEDS

SEQ ID NO: 215 - protein, 133 aa, Artificial Sequence
  Synthetic Polypeptide
QGQDRHMIRMRQLINIVDQLKNYVNDLVPEFLPAPEDVETNCEWSAFSCFQKAQLKSANTGNNERIINVSIAKLKRKPPSTNAGRRQKHRLTCPSCDSYEKKPPKEFLERFKSLLQKMIHQHLSSRTHGSEDS

SEQ ID NO: 216 - protein, 133 aa, Artificial Sequence
  Synthetic Polypeptide
QGQDRHMIRMRQLINIVDQLKNYVNDLVPEFLPAPEDVETNCEWSAFSCFQKAQLKSANTGNNERIINVSIKALKRKPPSTNAGRRQKHRLTCPSCDSYEKKPPKEFLERFKSLLQKMIHQHLSSRTHGSEDS

SEQ ID NO: 217 - protein, 133 aa, Artificial Sequence
  Synthetic Polypeptide
QGQDRHMIRMRQLIDIVDQLKNYVNDLVPEFLPAPEDVETNCEWSAFSCFQKAQLKSANTGNNERIINVSLKQLKRKPPSTNAGRRQKHRLTCPSCDSYEKKPPKEFLERFKSLLQKMIHQHLSSRTHGSEDS

SEQ ID NO: 218 - protein, 133 aa, Artificial Sequence
  Synthetic Polypeptide
QGQDRHMIRMRQLIDIVDQLKNYVNDLVPEFLPAPEDVETNCEWSAFSCFQKAQLKSANTGNNERIINVSIAQLKRKPPSTNAGRRQKHRLTCPSCDSYEKKPPKEFLERFKSLLQKMIHQHLSSRTHGSEDS

SEQ ID NO: 219 - protein, 133 aa, Artificial Sequence
  Synthetic Polypeptide
QGQDRHMIRMRQLIDIVDQLKNYVNDLVPEFLPAPEDVETNCEWSAFSCFQKAQLKSANTGNNERIINVTIKQLKRKPPSTNAGRRQKHRLTCPSCDSYEKKPPKEFLERFKSLLQKMIHQHLSSRTHGSEDS

SEQ ID NO: 220 - protein, 133 aa, Artificial Sequence
  Synthetic Polypeptide
  MISC_FEATURE (76)..(76): Xaa is A, D, or E
QGQDRHMIRMRQLIDIVDQLKNYVNDLVPEFLPAPEDVETNCEWSAFSCFQKAQLKSANTGNNERIINVSLKKLKXKPPSTNAGRRQKHRLTCPSCDSYEKKPPKEFLERFKSLLQKMIHQHLSSRTHGSEDS

SEQ ID NO: 221 - protein, 133 aa, Artificial Sequence
  Synthetic Polypeptide
  MISC_FEATURE (76)..(76): Xaa is A, D, or E
QGQDRHMIRMRQLIDIVDQLKNYVNDLVPEFLPAPEDVETNCEWSAFSCFQKAQLKSANTGNNERIINVSIAKLKXKPPSTNAGRRQKHRLTCPSCDSYEKKPPKEFLERFKSLLQKMIHQHLSSRTHGSEDS

SEQ ID NO: 222 - protein, 133 aa, Artificial Sequence
  Synthetic Polypeptide
  MISC_FEATURE (76)..(76): Xaa is A, D, or E
QGQDRHMIRMRQLIDIVDQLKNYVNDLVPEFLPAPEDVETNCEWSAFSCFQKAQLKSANTGNNERIINVSIKALKXKPPSTNAGRRQKHRLTCPSCDSYEKKPPKEFLERFKSLLQKMIHQHLSSRTHGSEDS

SEQ ID NO: 223 - skipped

SEQ ID NO: 224 - protein, 133 aa, Artificial Sequence; identical to SEQ ID NO: 210
  Synthetic Polypeptide
  MISC_FEATURE (5)..(5): Xaa is A, E, or Q
  MISC_FEATURE (76)..(76): Xaa is A or E

SEQ ID NO: 225 - protein, 133 aa, Artificial Sequence; identical to SEQ ID NO: 211
  Synthetic Polypeptide
  MISC_FEATURE (9)..(9): Xaa is A or E
  MISC_FEATURE (76)..(76): Xaa is A or E

SEQ ID NO: 226 - protein, 133 aa, Artificial Sequence
  Synthetic Polypeptide
  MISC_FEATURE (76)..(76): Xaa is A, D, or E
QGQDRHMIRMRQLIDIVDQLKNYVNDLVPEFLPAPEDVETNCEWSAFSCFQKAQLKSANTGNNERIINVTIKKLKXKPPSTNAGRRQKHRLTCPSCDSYEKKPPKEFLERFKSLLQKMIHQHLSSRTHGSEDS

SEQ ID NO: 227 - protein, 133 aa, Artificial Sequence
  Synthetic Polypeptide
QGQDRHMIRMRQLIDIVDQLKNYVNDLVPEFLPAPEDVETNCEWSAFSCFQKAQLKSANTGNNERIINVSLKKLKAKPPSTNAGRRQKHRLTCPSCDSYEKKPPKEFLERFKSLLQKMIHQHLSSRTHGSEDS

SEQ ID NO: 228 - protein, 133 aa, Artificial Sequence
  Synthetic Polypeptide
QGQDRHMIRMRQLIDIVDQLKNYVNDLVPEFLPAPEDVETNCEWSAFSCFQKAQLKSANTGNNERIINVSLKKLKDKPPSTNAGRRQKHRLTCPSCDSYEKKPPKEFLERFKSLLQKMIHQHLSSRTHGSEDS

SEQ ID NO: 229 - protein, 133 aa, Artificial Sequence
  Synthetic Polypeptide
QGQDRHMIRMRQLIDIVDQLKNYVNDLVPEFLPAPEDVETNCEWSAFSCFQKAQLKSANTGNNERIINVSLKKLKEKPPSTNAGRRQKHRLTCPSCDSYEKKPPKEFLERFKSLLQKMIHQHLSSRTHGSEDS

SEQ ID NO: 230 - protein, 133 aa, Artificial Sequence
  Synthetic Polypeptide
QGQDRHMIRMRQLIDIVDQLKNYVNDLVPEFLPAPEDVETNCEWSAFSCFQKAQLKSANTGNNERIINVSIAKLKAKPPSTNAGRRQKHRLTCPSCDSYEKKPPKEFLERFKSLLQKMIHQHLSSRTHGSEDS

SEQ ID NO: 231 - protein, 133 aa, Artificial Sequence
  Synthetic Polypeptide
QGQDRHMIRMRQLIDIVDQLKNYVNDLVPEFLPAPEDVETNCEWSAFSCFQKAQLKSANTGNNERIINVSIAKLKDKPPSTNAGRRQKHRLTCPSCDSYEKKPPKEFLERFKSLLQKMIHQHLSSRTHGSEDS

SEQ ID NO: 232 - protein, 133 aa, Artificial Sequence
  Synthetic Polypeptide
QGQDRHMIRMRQLIDIVDQLKNYVNDLVPEFLPAPEDVETNCEWSAFSCFQKAQLKSANTGNNERIINVSIAKLKEKPPSTNAGRRQKHRLTCPSCDSYEKKPPKEFLERFKSLLQKMIHQHLSSRTHGSEDS

SEQ ID NO: 233 - protein, 133 aa, Artificial Sequence
  Synthetic Polypeptide
QGQDRHMIRMRQLIDIVDQLKNYVNDLVPEFLPAPEDVETNCEWSAFSCFQKAQLKSANTGNNERIINVSIKALKAKPPSTNAGRRQKHRLTCPSCDSYEKKPPKEFLERFKSLLQKMIHQHLSSRTHGSEDS

SEQ ID NO: 234 - protein, 133 aa, Artificial Sequence
  Synthetic Polypeptide
QGQDRHMIRMRQLIDIVDQLKNYVNDLVPEFLPAPEDVETNCEWSAFSCFQKAQLKSANTGNNERIINVSIKALKDKPPSTNAGRRQKHRLTCPSCDSYEKKPPKEFLERFKSLLQKMIHQHLSSRTHGSEDS

SEQ ID NO: 235 - protein, 133 aa, Artificial Sequence
  Synthetic Polypeptide
QGQDRHMIRMRQLIDIVDQLKNYVNDLVPEFLPAPEDVETNCEWSAFSCFQKAQLKSANTGNNERIINVSIKALKEKPPSTNAGRRQKHRLTCPSCDSYEKKPPKEFLERFKSLLQKMIHQHLSSRTHGSEDS

SEQ ID NO: 236 - protein, 133 aa, Artificial Sequence
  Synthetic Polypeptide
QGQDAHMIRMRQLIDIVDQLKNYVNDLVPEFLPAPEDVETNCEWSAFSCFQKAQLKSANTGNNERIINVSIKKLKAKPPSTNAGRRQKHRLTCPSCDSYEKKPPKEFLERFKSLLQKMIHQHLSSRTHGSEDS

SEQ ID NO: 237 - protein, 133 aa, Artificial Sequence
  Synthetic Polypeptide
QGQDAHMIRMRQLIDIVDQLKNYVNDLVPEFLPAPEDVETNCEWSAFSCFQKAQLKSANTGNNERIINVSIKKLKEKPPSTNAGRRQKHRLTCPSCDSYEKKPPKEFLERFKSLLQKMIHQHLSSRTHGSEDS

SEQ ID NO: 238 - protein, 133 aa, Artificial Sequence
  Synthetic Polypeptide
QGQDEHMIRMRQLIDIVDQLKNYVNDLVPEFLPAPEDVETNCEWSAFSCFQKAQLKSANTGNNERIINVSIKKLKAKPPSTNAGRRQKHRLTCPSCDSYEKKPPKEFLERFKSLLQKMIHQHLSSRTHGSEDS

SEQ ID NO: 239 - protein, 133 aa, Artificial Sequence
  Synthetic Polypeptide
QGQDEHMIRMRQLIDIVDQLKNYVNDLVPEFLPAPEDVETNCEWSAFSCFQKAQLKSANTGNNERIINVSIKKLKEKPPSTNAGRRQKHRLTCPSCDSYEKKPPKEFLERFKSLLQKMIHQHLSSRTHGSEDS

SEQ ID NO: 240 - protein, 133 aa, Artificial Sequence
  Synthetic Polypeptide
QGQDQHMIRMRQLIDIVDQLKNYVNDLVPEFLPAPEDVETNCEWSAFSCFQKAQLKSANTGNNERIINVSIKKLKAKPPSTNAGRRQKHRLTCPSCDSYEKKPPKEFLERFKSLLQKMIHQHLSSRTHGSEDS

SEQ ID NO: 241 - protein, 133 aa, Artificial Sequence
  Synthetic Polypeptide
QGQDQHMIRMRQLIDIVDQLKNYVNDLVPEFLPAPEDVETNCEWSAFSCFQKAQLKSANTGNNERIINVSIKKLKEKPPSTNAGRRQKHRLTCPSCDSYEKKPPKEFLERFKSLLQKMIHQHLSSRTHGSEDS

SEQ ID NO: 242 - protein, 133 aa, Artificial Sequence
  Synthetic Polypeptide
QGQDRHMIAMRQLIDIVDQLKNYVNDLVPEFLPAPEDVETNCEWSAFSCFQKAQLKSANTGNNERIINVSIKKLKAKPPSTNAGRRQKHRLTCPSCDSYEKKPPKEFLERFKSLLQKMIHQHLSSRTHGSEDS

SEQ ID NO: 243 - protein, 133 aa, Artificial Sequence
  Synthetic Polypeptide
QGQDRHMIAMRQLIDIVDQLKNYVNDLVPEFLPAPEDVETNCEWSAFSCFQKAQLKSANTGNNERIINVSIKKLKEKPPSTNAGRRQKHRLTCPSCDSYEKKPPKEFLERFKSLLQKMIHQHLSSRTHGSEDS

SEQ ID NO: 244 - protein, 133 aa, Artificial Sequence
  Synthetic Polypeptide
QGQDRHMIEMRQLIDIVDQLKNYVNDLVPEFLPAPEDVETNCEWSAFSCFQKAQLKSANTGNNERIINVSIKKLKAKPPSTNAGRRQKHRLTCPSCDSYEKKPPKEFLERFKSLLQKMIHQHLSSRTHGSEDS

SEQ ID NO: 245 - protein, 133 aa, Artificial Sequence
  Synthetic Polypeptide
QGQDRHMIEMRQLIDIVDQLKNYVNDLVPEFLPAPEDVETNCEWSAFSCFQKAQLKSANTGNNERIINVSIKKLKEKPPSTNAGRRQKHRLTCPSCDSYEKKPPKEFLERFKSLLQKMIHQHLSSRTHGSEDS

SEQ ID NO: 246 - protein, 133 aa, Artificial Sequence
  Synthetic Polypeptide
QGQDRHMIRMRQLIDIVDQLKNYVNDLVPEFLPAPEDVETNCEWSAFSCFQKAQLKSANTGNNERIINVTIKKLKAKPPSTNAGRRQKHRLTCPSCDSYEKKPPKEFLERFKSLLQKMIHQHLSSRTHGSEDS

SEQ ID NO: 247 - protein, 133 aa, Artificial Sequence
  Synthetic Polypeptide
QGQDRHMIRMRQLIDIVDQLKNYVNDLVPEFLPAPEDVETNCEWSAFSCFQKAQLKSANTGNNERIINVTIKKLKDKPPSTNAGRRQKHRLTCPSCDSYEKKPPKEFLERFKSLLQKMIHQHLSSRTHGSEDS

SEQ ID NO: 248 - protein, 133 aa, Artificial Sequence
  Synthetic Polypeptide
QGQDRHMIRMRQLIDIVDQLKNYVNDLVPEFLPAPEDVETNCEWSAFSCFQKAQLKSANTGNNERIINVTIKKLKEKPPSTNAGRRQKHRLTCPSCDSYEKKPPKEFLERFKSLLQKMIHQHLSSRTHGSEDS

SEQ ID NO: 249 - protein, 133 aa, Artificial Sequence
  Synthetic Polypeptide
QGQDRHMIRMRDLIDIVDQLKNYVNDLVPEFLPAPEDVETNCEWSAFSCFQKAQLKSANTGNNERIINVSIKKLKRKPPSTNAGRRQKHRLTCPSCDSYEKKPPKEFLERFKSLLQKMIHQHLSSRTHGSEDS

SEQ ID NO: 250 - protein, 133 aa, Artificial Sequence
  Synthetic Polypeptide
QGQDRHMIRMRELIDIVDQLKNYVNDLVPEFLPAPEDVETNCEWSAFSCFQKAQLKSANTGNNERIINVSIKKLKRKPPSTNAGRRQKHRLTCPSCDSYEKKPPKEFLERFKSLLQKMIHQHLSSRTHGSEDS

SEQ ID NO: 251 - protein, 133 aa, Artificial Sequence
  Synthetic Polypeptide
QGQDRHMIRMRNLIDIVDQLKNYVNDLVPEFLPAPEDVETNCEWSAFSCFQKAQLKSANTGNNERIINVSIKKLKRKPPSTNAGRRQKHRLTCPSCDSYEKKPPKEFLERFKSLLQKMIHQHLSSRTHGSEDS

SEQ ID NO: 252 - protein, 133 aa, Artificial Sequence
  Synthetic Polypeptide
QGQDRHMIRMRSLIDIVDQLKNYVNDLVPEFLPAPEDVETNCEWSAFSCFQKAQLKSANTGNNERIINVSIKKLKRKPPSTNAGRRQKHRLTCPSCDSYEKKPPKEFLERFKSLLQKMIHQHLSSRTHGSEDS

SEQ ID NO: 253 - protein, 133 aa, Artificial Sequence
  Synthetic Polypeptide
QGQDRHMIRMRTLIDIVDQLKNYVNDLVPEFLPAPEDVETNCEWSAFSCFQKAQLKSANTGNNERIINVSIKKLKRKPPSTNAGRRQKHRLTCPSCDSYEKKPPKEFLERFKSLLQKMIHQHLSSRTHGSEDS

SEQ ID NO: 254 - protein, 133 aa, Artificial Sequence
  Synthetic Polypeptide
QGQDRHMIRMRVLIDIVDQLKNYVNDLVPEFLPAPEDVETNCEWSAFSCFQKAQLKSANTGNNERIINVSIKKLKRKPPSTNAGRRQKHRLTCPSCDSYEKKPPKEFLERFKSLLQKMIHQHLSSRTHGSEDS

SEQ ID NO: 255 - protein, 133 aa, Artificial Sequence; identical to SEQ ID NO: 219
  Synthetic Polypeptide

SEQ ID NO: 256-261 - skipped (6 entries)

SEQ ID NO: 262 - protein, 5 aa, Artificial Sequence
  Synthetic Polypeptide
GGGGS

SEQ ID NO: 263-264 - skipped (2 entries)

SEQ ID NO: 265 - protein, 330 aa, Artificial Sequence
  Synthetic Polypeptide
ASTKGPSVFPLAPSSKSTSGGTAALGCLVKDYFPEPVTVSWNSGALTSGVHTFPAVLQSSGLYSLSSVVTVPSSSLGTQTYICNVNHKPSNTKVDKKVEPKSCDKTHTCPPCPAPELLGGPSVFLFPPKPKDTLMISRTPEVTCVVVDVSHEDPEVKFNWYVDGVEVHNAKTKPCEEQYGSTYRCVSVLTVLHQDWLNGKEYKCKVSNKALPAPIEKTISKAKGQPREPQVYTLPPSREEMTKNQVSLTCLVKGFYPSDIAVEWESNGQPENNYKTTPPVLDSDGSFFLYSKLTVDKSRWQQGNVFSCSVMHEALHNHYTQKSLSLSPGK

SEQ ID NO: 266 - protein, 329 aa, Artificial Sequence
  Synthetic Polypeptide
ASTKGPSVFPLAPSSKSTSGGTAALGCLVKDYFPEPVTVSWNSGALTSGVHTFPAVLQSSGLYSLSSVVTVPSSSLGTQTYICNVNHKPSNTKVDKKVEPKSCDKTHTCPPCPAPELLGGPSVFLFPPKPKDTLMISRTPEVTCVVVDVSHEDPEVKFNWYVDGVEVHNAKTKPCEEQYGSTYRCVSVLTVLHQDWLNGKEYKCKVSNKALPAPIEKTISKAKGQPREPQVYTLPPSREEMTKNQVSLTCLVKGFYPSDIAVEWESNGQPENNYKTTPPVLDSDGSFFLYSKLTVDKSRWQQGNVFSCSVMHEALHNHYTQKSLSLSPG

SEQ ID NO: 267 - protein, 334 aa, Artificial Sequence
  Synthetic Polypeptide
ASTKGPSVFPLAPSSKSTSGGTAALGCLVKDYFPEPVTVSWNSGALTSGVHTFPAVLQSSGLYSLSSVVTVPSSSLGTQTYICNVNHKPSNTKVDKKVEPKSCDKTHTCPPCPAPELLGGPSVFLFPPKPKDTLMISRTPEVTCVVVDVSHEDPEVKFNWYVDGVEVHNAKTKPCEEQYGSTYRCVSVLTVLHQDWLNGKEYKCKVSNKALPAPIEKTISKAKGQPREPQVYTLPPSREEMTKNQVSLTCLVKGFYPSDIAVEWESNGQPENNYKTTPPVLDSDGSFFLYSKLTVDKSRWQQGNVFSCSVMHEALHNHYTQKSLSLSPGGGGGS

SEQ ID NO: 268-281 - skipped (14 entries)

SEQ ID NO: 282 - protein, 335 aa, Artificial Sequence
  Synthetic Polypeptide
ASTKGPSVFPLAPSSKSTSGGTAALGCLVKDYFPEPVTVSWNSGALTSGVHTFPAVLQSSGLYSLSSVVTVPSSSLGTQTYICNVNHKPSNTKVDKKVEPKSCDKTHTCPPCPAPELLGGPSVFLFPPKPKDTLMISRTPEVTCVVVDVSHEDPEVKFNWYVDGVEVHNAKTKPCEEQYGSTYRCVSVLTVLHQDWLNGKEYKCKVSNKALPAPIEKTISKAKGQPREPQVYTLPPSREEMTKNQVSLTCLVKGFYPSDIAVEWESNGQPENNYKTTPPVLDSDGSFFLYSKLTVDKSRWQQGNVFSCSVMHEALHNHYTQKSLSLSPGKGGGGS

SEQ ID NO: 283 - protein, 133 aa, Artificial Sequence
  Synthetic Polypeptide
QGQDRHMIRMRQLITIVDQLKNYVNDLVPEFLPAPEDVETNCEWSAFSCFQKAQLKSANTGNNERIINVSIKKLKRKPPSTNAGRRQKHRLTCPSCDSYEKKPPKEFLERFKSLLQKMIHQHLSSRTHGSEDS

SEQ ID NO: 284 - protein, 330 aa, Artificial Sequence
  Synthetic Polypeptide
ASTKGPSVFPLAPSSKSTSGGTAALGCLVKDYFPEPVTVSWNSGALTSGVHTFPAVLQSSGLYSLSSVVTVPSSSLGTQTYICNVNHKPSNTKVDKKVEPKSCDKTHTCPPCPAPELLGGPSVFLFPPKPKDTLMISRTPEVTCVVVDVSHEDPEVKFNWYVDGVEVHNAKTKPREEQYNSTYRVVSVLTVLHQDWLNGKEYKCKVSNKALPAPIEKTISKAKGQPREPQVYTLPPSREEMTKNQVSLTCLVKGFYPSDIAVEWESNGQPENNYKTTPPVLDSDGSFFLYSKLTVDKSRWQQGNVFSCSVMHEALHNHYTQKSLSLSPGK

SEQ ID NO: 285 - protein, 329 aa, Artificial Sequence
  Synthetic Polypeptide
ASTKGPSVFPLAPSSKSTSGGTAALGCLVKDYFPEPVTVSWNSGALTSGVHTFPAVLQSSGLYSLSSVVTVPSSSLGTQTYICNVNHKPSNTKVDKKVEPKSCDKTHTCPPCPAPELLGGPSVFLFPPKPKDTLMISRTPEVTCVVVDVSHEDPEVKFNWYVDGVEVHNAKTKPREEQYNSTYRVVSVLTVLHQDWLNGKEYKCKVSNKALPAPIEKTISKAKGQPREPQVYTLPPSREEMTKNQVSLTCLVKGFYPSDIAVEWESNGQPENNYKTTPPVLDSDGSFFLYSKLTVDKSRWQQGNVFSCSVMHEALHNHYTQKSLSLSPG

SEQ ID NO: 286 - protein, 334 aa, Artificial Sequence
  Synthetic Polypeptide
ASTKGPSVFPLAPSSKSTSGGTAALGCLVKDYFPEPVTVSWNSGALTSGVHTFPAVLQSSGLYSLSSVVTVPSSSLGTQTYICNVNHKPSNTKVDKKVEPKSCDKTHTCPPCPAPELLGGPSVFLFPPKPKDTLMISRTPEVTCVVVDVSHEDPEVKFNWYVDGVEVHNAKTKPREEQYNSTYRVVSVLTVLHQDWLNGKEYKCKVSNKALPAPIEKTISKAKGQPREPQVYTLPPSREEMTKNQVSLTCLVKGFYPSDIAVEWESNGQPENNYKTTPPVLDSDGSFFLYSKLTVDKSRWQQGNVFSCSVMHEALHNHYTQKSLSLSPGGGGGS

SEQ ID NO: 287 - protein, 335 aa, Artificial Sequence
  Synthetic Polypeptide
ASTKGPSVFPLAPSSKSTSGGTAALGCLVKDYFPEPVTVSWNSGALTSGVHTFPAVLQSSGLYSLSSVVTVPSSSLGTQTYICNVNHKPSNTKVDKKVEPKSCDKTHTCPPCPAPELLGGPSVFLFPPKPKDTLMISRTPEVTCVVVDVSHEDPEVKFNWYVDGVEVHNAKTKPREEQYNSTYRVVSVLTVLHQDWLNGKEYKCKVSNKALPAPIEKTISKAKGQPREPQVYTLPPSREEMTKNQVSLTCLVKGFYPSDIAVEWESNGQPENNYKTTPPVLDSDGSFFLYSKLTVDKSRWQQGNVFSCSVMHEALHNHYTQKSLSLSPGKGGGGS

SEQ ID NO: 288 - protein, 330 aa, Artificial Sequence
  Synthetic Polypeptide
ASTKGPSVFPLAPSSKSTSGGTAALGCLVKDYFPEPVTVSWNSGALTSGVHTFPAVLQSSGLYSLSSVVTVPSSSLGTQTYICNVNHKPSNTKVDKKVEPKSCDKTHTCPPCPAPELLGGPSVFLFPPKPKDTLMISRTPEVTCVVVDVSHEDPEVKFNWYVDGVEVHNAKTKPREEQYNSTYRVVSVLTVLHQDWLNGKEYKCKVSNKALPAPIEKTISKAKGQPREPQVYTLPPSREEMTKNQVSLTCLVDGFYPSDIAVEWESNGQPENNYDTTPPVLDSDGSFFLYSDLTVDKSRWQQGNVFSCSVMHEALHNHYTQKSLSLSPGK

SEQ ID NO: 289 - protein, 330 aa, Artificial Sequence
  Synthetic Polypeptide
ASTKGPSVFPLAPSSKSTSGGTAALGCLVKDYFPEPVTVSWNSGALTSGVHTFPAVLQSSGLYSLSSVVTVPSSSLGTQTYICNVNHKPSNTKVDKKVEPKSCDKTHTCPPCPAPELLGGPSVFLFPPKPKDTLMISRTPEVTCVVVDVSHEDPEVKFNWYVDGVEVHNAKTKPREEQYNSTYRVVSVLTVLHQDWLNGKEYKCKVSNKALPAPIEKTISKAKGQPREPQVYTLPPSRKKMTKNQVSLTCLVKGFYPSDIAVEWESNGQPENNYKTTPPVLKSDGSFFLYSKLTVDKSRWQQGNVFSCSVMHEALHNHYTQKSLSLSPGK

SEQ ID NO: 290 - protein, 329 aa, Artificial Sequence
  Synthetic Polypeptide
ASTKGPSVFPLAPSSKSTSGGTAALGCLVKDYFPEPVTVSWNSGALTSGVHTFPAVLQSSGLYSLSSVVTVPSSSLGTQTYICNVNHKPSNTKVDKKVEPKSCDKTHTCPPCPAPELLGGPSVFLFPPKPKDTLMISRTPEVTCVVVDVSHEDPEVKFNWYVDGVEVHNAKTKPREEQYNSTYRVVSVLTVLHQDWLNGKEYKCKVSNKALPAPIEKTISKAKGQPREPQVYTLPPSREEMTKNQVSLTCLVDGFYPSDIAVEWESNGQPENNYDTTPPVLDSDGSFFLYSDLTVDKSRWQQGNVFSCSVMHEALHNHYTQKSLSLSPG

SEQ ID NO: 291 - protein, 329 aa, Artificial Sequence
  Synthetic Polypeptide
ASTKGPSVFPLAPSSKSTSGGTAALGCLVKDYFPEPVTVSWNSGALTSGVHTFPAVLQSSGLYSLSSVVTVPSSSLGTQTYICNVNHKPSNTKVDKKVEPKSCDKTHTCPPCPAPELLGGPSVFLFPPKPKDTLMISRTPEVTCVVVDVSHEDPEVKFNWYVDGVEVHNAKTKPREEQYNSTYRVVSVLTVLHQDWLNGKEYKCKVSNKALPAPIEKTISKAKGQPREPQVYTLPPSRKKMTKNQVSLTCLVKGFYPSDIAVEWESNGQPENNYKTTPPVLKSDGSFFLYSKLTVDKSRWQQGNVFSCSVMHEALHNHYTQKSLSLSPG

SEQ ID NO: 292 - protein, 334 aa, Artificial Sequence
  Synthetic Polypeptide
ASTKGPSVFPLAPSSKSTSGGTAALGCLVKDYFPEPVTVSWNSGALTSGVHTFPAVLQSSGLYSLSSVVTVPSSSLGTQTYICNVNHKPSNTKVDKKVEPKSCDKTHTCPPCPAPELLGGPSVFLFPPKPKDTLMISRTPEVTCVVVDVSHEDPEVKFNWYVDGVEVHNAKTKPREEQYNSTYRVVSVLTVLHQDWLNGKEYKCKVSNKALPAPIEKTISKAKGQPREPQVYTLPPSREEMTKNQVSLTCLVDGFYPSDIAVEWESNGQPENNYDTTPPVLDSDGSFFLYSDLTVDKSRWQQGNVFSCSVMHEALHNHYTQKSLSLSPGGGGGS

SEQ ID NO: 293 - protein, 334 aa, Artificial Sequence
  Synthetic Polypeptide
ASTKGPSVFPLAPSSKSTSGGTAALGCLVKDYFPEPVTVSWNSGALTSGVHTFPAVLQSSGLYSLSSVVTVPSSSLGTQTYICNVNHKPSNTKVDKKVEPKSCDKTHTCPPCPAPELLGGPSVFLFPPKPKDTLMISRTPEVTCVVVDVSHEDPEVKFNWYVDGVEVHNAKTKPREEQYNSTYRVVSVLTVLHQDWLNGKEYKCKVSNKALPAPIEKTISKAKGQPREPQVYTLPPSRKKMTKNQVSLTCLVKGFYPSDIAVEWESNGQPENNYKTTPPVLKSDGSFFLYSKLTVDKSRWQQGNVFSCSVMHEALHNHYTQKSLSLSPGGGGGS

SEQ ID NO: 294 - protein, 330 aa, Artificial Sequence
  Synthetic Polypeptide
ASTKGPSVFPLAPSSKSTSGGTAALGCLVKDYFPEPVTVSWNSGALTSGVHTFPAVLQSSGLYSLSSVVTVPSSSLGTQTYICNVNHKPSNTKVDKKVEPKSCDKTHTCPPCPAPELLGGPSVFLFPPKPKDTLMISRTPEVTCVVVDVSHEDPEVKFNWYVDGVEVHNAKTKPREEQYNSTYRVVSVLTVLHQDWLNGKEYKCKVSNKALPAPIEKTISKAKGQPREPQVYTLPPSREEMTKNQVSLTCLVKGFYPSDIAVEWESNGQPENNYDTTPPVLDSDGSFFLYSDLTVDKSRWQQGNVFSCSVMHEALHNHYTQKSLSLSPGK

SEQ ID NO: 295 - protein, 330 aa, Artificial Sequence
  Synthetic Polypeptide
ASTKGPSVFPLAPSSKSTSGGTAALGCLVKDYFPEPVTVSWNSGALTSGVHTFPAVLQSSGLYSLSSVVTVPSSSLGTQTYICNVNHKPSNTKVDKKVEPKSCDKTHTCPPCPAPELLGGPSVFLFPPKPKDTLMISRTPEVTCVVVDVSHEDPEVKFNWYVDGVEVHNAKTKPREEQYNSTYRVVSVLTVLHQDWLNGKEYKCKVSNKALPAPIEKTISKAKGQPREPQVYTLPPSRKEMTKNQVSLTCLVKGFYPSDIAVEWESNGQPENNYKTTPPVLKSDGSFFLYSKLTVDKSRWQQGNVFSCSVMHEALHNHYTQKSLSLSPGK

SEQ ID NO: 296 - protein, 329 aa, Artificial Sequence
  Synthetic Polypeptide
ASTKGPSVFPLAPSSKSTSGGTAALGCLVKDYFPEPVTVSWNSGALTSGVHTFPAVLQSSGLYSLSSVVTVPSSSLGTQTYICNVNHKPSNTKVDKKVEPKSCDKTHTCPPCPAPELLGGPSVFLFPPKPKDTLMISRTPEVTCVVVDVSHEDPEVKFNWYVDGVEVHNAKTKPREEQYNSTYRVVSVLTVLHQDWLNGKEYKCKVSNKALPAPIEKTISKAKGQPREPQVYTLPPSREEMTKNQVSLTCLVKGFYPSDIAVEWESNGQPENNYDTTPPVLDSDGSFFLYSDLTVDKSRWQQGNVFSCSVMHEALHNHYTQKSLSLSPG

SEQ ID NO: 297 - protein, 329 aa, Artificial Sequence
  Synthetic Polypeptide
ASTKGPSVFPLAPSSKSTSGGTAALGCLVKDYFPEPVTVSWNSGALTSGVHTFPAVLQSSGLYSLSSVVTVPSSSLGTQTYICNVNHKPSNTKVDKKVEPKSCDKTHTCPPCPAPELLGGPSVFLFPPKPKDTLMISRTPEVTCVVVDVSHEDPEVKFNWYVDGVEVHNAKTKPREEQYNSTYRVVSVLTVLHQDWLNGKEYKCKVSNKALPAPIEKTISKAKGQPREPQVYTLPPSRKEMTKNQVSLTCLVKGFYPSDIAVEWESNGQPENNYKTTPPVLKSDGSFFLYSKLTVDKSRWQQGNVFSCSVMHEALHNHYTQKSLSLSPG

SEQ ID NO: 298 - protein, 334 aa, Artificial Sequence
  Synthetic Polypeptide
ASTKGPSVFPLAPSSKSTSGGTAALGCLVKDYFPEPVTVSWNSGALTSGVHTFPAVLQSSGLYSLSSVVTVPSSSLGTQTYICNVNHKPSNTKVDKKVEPKSCDKTHTCPPCPAPELLGGPSVFLFPPKPKDTLMISRTPEVTCVVVDVSHEDPEVKFNWYVDGVEVHNAKTKPREEQYNSTYRVVSVLTVLHQDWLNGKEYKCKVSNKALPAPIEKTISKAKGQPREPQVYTLPPSREEMTKNQVSLTCLVKGFYPSDIAVEWESNGQPENNYDTTPPVLDSDGSFFLYSDLTVDKSRWQQGNVFSCSVMHEALHNHYTQKSLSLSPGGGGGS

SEQ ID NO: 299 - protein, 334 aa, Artificial Sequence
  Synthetic Polypeptide
ASTKGPSVFPLAPSSKSTSGGTAALGCLVKDYFPEPVTVSWNSGALTSGVHTFPAVLQSSGLYSLSSVVTVPSSSLGTQTYICNVNHKPSNTKVDKKVEPKSCDKTHTCPPCPAPELLGGPSVFLFPPKPKDTLMISRTPEVTCVVVDVSHEDPEVKFNWYVDGVEVHNAKTKPREEQYNSTYRVVSVLTVLHQDWLNGKEYKCKVSNKALPAPIEKTISKAKGQPREPQVYTLPPSRKEMTKNQVSLTCLVKGFYPSDIAVEWESNGQPENNYKTTPPVLKSDGSFFLYSKLTVDKSRWQQGNVFSCSVMHEALHNHYTQKSLSLSPGGGGGS

SEQ ID NO: 300 - protein, 330 aa, Artificial Sequence
  Synthetic Polypeptide
ASTKGPSVFPLAPSSKSTSGGTAALGCLVKDYFPEPVTVSWNSGALTSGVHTFPAVLQSSGLYSLSSVVTVPSSSLGTQTYICNVNHKPSNTKVDKKVEPKSCDKTHTCPPCPAPELLGGPSVFLFPPKPKDTLMISRTPEVTCVVVDVSHEDPEVKFNWYVDGVEVHNAKTKPCEEQYGSTYRCVSVLTVLHQDWLNGKEYKCKVSNKALPAPIEKTISKAKGQPREPQVYTLPPSREEMTKNQVSLTCLVDGFYPSDIAVEWESNGQPENNYDTTPPVLDSDGSFFLYSDLTVDKSRWQQGNVFSCSVMHEALHNHYTQKSLSLSPGK

SEQ ID NO: 301 - protein, 330 aa, Artificial Sequence
  Synthetic Polypeptide
ASTKGPSVFPLAPSSKSTSGGTAALGCLVKDYFPEPVTVSWNSGALTSGVHTFPAVLQSSGLYSLSSVVTVPSSSLGTQTYICNVNHKPSNTKVDKKVEPKSCDKTHTCPPCPAPELLGGPSVFLFPPKPKDTLMISRTPEVTCVVVDVSHEDPEVKFNWYVDGVEVHNAKTKPCEEQYGSTYRCVSVLTVLHQDWLNGKEYKCKVSNKALPAPIEKTISKAKGQPREPQVYTLPPSRKKMTKNQVSLTCLVKGFYPSDIAVEWESNGQPENNYKTTPPVLKSDGSFFLYSKLTVDKSRWQQGNVFSCSVMHEALHNHYTQKSLSLSPGK

SEQ ID NO: 302 - protein, 329 aa, Artificial Sequence
  Synthetic Polypeptide
ASTKGPSVFPLAPSSKSTSGGTAALGCLVKDYFPEPVTVSWNSGALTSGVHTFPAVLQSSGLYSLSSVVTVPSSSLGTQTYICNVNHKPSNTKVDKKVEPKSCDKTHTCPPCPAPELLGGPSVFLFPPKPKDTLMISRTPEVTCVVVDVSHEDPEVKFNWYVDGVEVHNAKTKPCEEQYGSTYRCVSVLTVLHQDWLNGKEYKCKVSNKALPAPIEKTISKAKGQPREPQVYTLPPSREEMTKNQVSLTCLVDGFYPSDIAVEWESNGQPENNYDTTPPVLDSDGSFFLYSDLTVDKSRWQQGNVFSCSVMHEALHNHYTQKSLSLSPG

SEQ ID NO: 303 - protein, 329 aa, Artificial Sequence
  Synthetic Polypeptide
ASTKGPSVFPLAPSSKSTSGGTAALGCLVKDYFPEPVTVSWNSGALTSGVHTFPAVLQSSGLYSLSSVVTVPSSSLGTQTYICNVNHKPSNTKVDKKVEPKSCDKTHTCPPCPAPELLGGPSVFLFPPKPKDTLMISRTPEVTCVVVDVSHEDPEVKFNWYVDGVEVHNAKTKPCEEQYGSTYRCVSVLTVLHQDWLNGKEYKCKVSNKALPAPIEKTISKAKGQPREPQVYTLPPSRKKMTKNQVSLTCLVKGFYPSDIAVEWESNGQPENNYKTTPPVLKSDGSFFLYSKLTVDKSRWQQGNVFSCSVMHEALHNHYTQKSLSLSPG

SEQ ID NO: 304 - protein, 334 aa, Artificial Sequence
  Synthetic Polypeptide
ASTKGPSVFPLAPSSKSTSGGTAALGCLVKDYFPEPVTVSWNSGALTSGVHTFPAVLQSSGLYSLSSVVTVPSSSLGTQTYICNVNHKPSNTKVDKKVEPKSCDKTHTCPPCPAPELLGGPSVFLFPPKPKDTLMISRTPEVTCVVVDVSHEDPEVKFNWYVDGVEVHNAKTKPCEEQYGSTYRCVSVLTVLHQDWLNGKEYKCKVSNKALPAPIEKTISKAKGQPREPQVYTLPPSREEMTKNQVSLTCLVDGFYPSDIAVEWESNGQPENNYDTTPPVLDSDGSFFLYSDLTVDKSRWQQGNVFSCSVMHEALHNHYTQKSLSLSPGGGGGS

SEQ ID NO: 305 - protein, 334 aa, Artificial Sequence
  Synthetic Polypeptide
ASTKGPSVFPLAPSSKSTSGGTAALGCLVKDYFPEPVTVSWNSGALTSGVHTFPAVLQSSGLYSLSSVVTVPSSSLGTQTYICNVNHKPSNTKVDKKVEPKSCDKTHTCPPCPAPELLGGPSVFLFPPKPKDTLMISRTPEVTCVVVDVSHEDPEVKFNWYVDGVEVHNAKTKPCEEQYGSTYRCVSVLTVLHQDWLNGKEYKCKVSNKALPAPIEKTISKAKGQPREPQVYTLPPSRKKMTKNQVSLTCLVKGFYPSDIAVEWESNGQPENNYKTTPPVLKSDGSFFLYSKLTVDKSRWQQGNVFSCSVMHEALHNHYTQKSLSLSPGGGGGS

SEQ ID NO: 306 - protein, 330 aa, Artificial Sequence
  Synthetic Polypeptide
ASTKGPSVFPLAPSSKSTSGGTAALGCLVKDYFPEPVTVSWNSGALTSGVHTFPAVLQSSGLYSLSSVVTVPSSSLGTQTYICNVNHKPSNTKVDKKVEPKSCDKTHTCPPCPAPELLGGPSVFLFPPKPKDTLMISRTPEVTCVVVDVSHEDPEVKFNWYVDGVEVHNAKTKPCEEQYGSTYRCVSVLTVLHQDWLNGKEYKCKVSNKALPAPIEKTISKAKGQPREPQVYTLPPSREEMTKNQVSLTCLVKGFYPSDIAVEWESNGQPENNYDTTPPVLDSDGSFFLYSDLTVDKSRWQQGNVFSCSVMHEALHNHYTQKSLSLSPGK

SEQ ID NO: 307 - protein, 330 aa, Artificial Sequence
  Synthetic Polypeptide
ASTKGPSVFPLAPSSKSTSGGTAALGCLVKDYFPEPVTVSWNSGALTSGVHTFPAVLQSSGLYSLSSVVTVPSSSLGTQTYICNVNHKPSNTKVDKKVEPKSCDKTHTCPPCPAPELLGGPSVFLFPPKPKDTLMISRTPEVTCVVVDVSHEDPEVKFNWYVDGVEVHNAKTKPCEEQYGSTYRCVSVLTVLHQDWLNGKEYKCKVSNKALPAPIEKTISKAKGQPREPQVYTLPPSRKEMTKNQVSLTCLVKGFYPSDIAVEWESNGQPENNYKTTPPVLKSDGSFFLYSKLTVDKSRWQQGNVFSCSVMHEALHNHYTQKSLSLSPGK

SEQ ID NO: 308 - protein, 329 aa, Artificial Sequence
  Synthetic Polypeptide
ASTKGPSVFPLAPSSKSTSGGTAALGCLVKDYFPEPVTVSWNSGALTSGVHTFPAVLQSSGLYSLSSVVTVPSSSLGTQTYICNVNHKPSNTKVDKKVEPKSCDKTHTCPPCPAPELLGGPSVFLFPPKPKDTLMISRTPEVTCVVVDVSHEDPEVKFNWYVDGVEVHNAKTKPCEEQYGSTYRCVSVLTVLHQDWLNGKEYKCKVSNKALPAPIEKTISKAKGQPREPQVYTLPPSREEMTKNQVSLTCLVKGFYPSDIAVEWESNGQPENNYDTTPPVLDSDGSFFLYSDLTVDKSRWQQGNVFSCSVMHEALHNHYTQKSLSLSPG

SEQ ID NO: 309 - protein, 329 aa, Artificial Sequence
  Synthetic Polypeptide
ASTKGPSVFPLAPSSKSTSGGTAALGCLVKDYFPEPVTVSWNSGALTSGVHTFPAVLQSSGLYSLSSVVTVPSSSLGTQTYICNVNHKPSNTKVDKKVEPKSCDKTHTCPPCPAPELLGGPSVFLFPPKPKDTLMISRTPEVTCVVVDVSHEDPEVKFNWYVDGVEVHNAKTKPCEEQYGSTYRCVSVLTVLHQDWLNGKEYKCKVSNKALPAPIEKTISKAKGQPREPQVYTLPPSRKEMTKNQVSLTCLVKGFYPSDIAVEWESNGQPENNYKTTPPVLKSDGSFFLYSKLTVDKSRWQQGNVFSCSVMHEALHNHYTQKSLSLSPG

SEQ ID NO: 310 - protein, 334 aa, Artificial Sequence
  Synthetic Polypeptide
ASTKGPSVFPLAPSSKSTSGGTAALGCLVKDYFPEPVTVSWNSGALTSGVHTFPAVLQSSGLYSLSSVVTVPSSSLGTQTYICNVNHKPSNTKVDKKVEPKSCDKTHTCPPCPAPELLGGPSVFLFPPKPKDTLMISRTPEVTCVVVDVSHEDPEVKFNWYVDGVEVHNAKTKPCEEQYGSTYRCVSVLTVLHQDWLNGKEYKCKVSNKALPAPIEKTISKAKGQPREPQVYTLPPSREEMTKNQVSLTCLVKGFYPSDIAVEWESNGQPENNYDTTPPVLDSDGSFFLYSDLTVDKSRWQQGNVFSCSVMHEALHNHYTQKSLSLSPGGGGGS

SEQ ID NO: 311 - protein, 334 aa, Artificial Sequence
  Synthetic Polypeptide
ASTKGPSVFPLAPSSKSTSGGTAALGCLVKDYFPEPVTVSWNSGALTSGVHTFPAVLQSSGLYSLSSVVTVPSSSLGTQTYICNVNHKPSNTKVDKKVEPKSCDKTHTCPPCPAPELLGGPSVFLFPPKPKDTLMISRTPEVTCVVVDVSHEDPEVKFNWYVDGVEVHNAKTKPCEEQYGSTYRCVSVLTVLHQDWLNGKEYKCKVSNKALPAPIEKTISKAKGQPREPQVYTLPPSRKEMTKNQVSLTCLVKGFYPSDIAVEWESNGQPENNYKTTPPVLKSDGSFFLYSKLTVDKSRWQQGNVFSCSVMHEALHNHYTQKSLSLSPGGGGGS

SEQ ID NO: 312 - protein, 5 aa, Artificial Sequence
  Synthetic peptide
NYGMH

SEQ ID NO: 313 - protein, 17 aa, Artificial Sequence
  Synthetic peptide
LIWYDGSKKYYADSVKG

SEQ ID NO: 314 - protein, 16 aa, Artificial Sequence
  Synthetic peptide
DPSSLTGSTGYYGMDV

SEQ ID NO: 315 - protein, 11 aa, Artificial Sequence
  Synthetic peptide
SGDKLGDKYAC

SEQ ID NO: 316 - protein, 7 aa, Artificial Sequence
  Synthetic peptide
QDRKRPS

SEQ ID NO: 317 - protein, 9 aa, Artificial Sequence
  Synthetic peptide
QAWDSSTEV

SEQ ID NO: 318 - protein, 125 aa, Artificial Sequence
  Synthetic peptide
QVQLVESGGGVVQPGRSLRLSCAASGFTFSNYGMHWVRQAPGKGLEWVALIWYDGSKKYYADSVKGRFTISRDNSKNTLYLQMNSLRAEDTAAYYCARDPSSLTGSTGYYGMDVWGQGTTVTVSS

SEQ ID NO: 319 - protein, 106 aa, Artificial Sequence
  Synthetic peptide
SYELTQPPSVSVSPGQTASITCSGDKLGDKYACWYQQKPGQSPVLVIYQDRKRPSGIPERFSGSNSGNTATLTISGTQAMDEADYYCQAWDSSTEVFGGGTKLTVL

SEQ ID NO: 320 - protein, 477 aa, Artificial Sequence
  Synthetic peptide
MDMRVPAQLLGLLLLWLRGARCQVQLVESGGGVVQPGRSLRLSCAASGFTFSNYGMHWVRQAPGKGLEWVALIWYDGSKKYYADSVKGRFTISRDNSKNTLYLQMNSLRAEDTAAYYCARDPSSLTGSTGYYGMDVWGQGTTVTVSSASTKGPSVFPLAPSSKSTSGGTAALGCLVKDYFPEPVTVSWNSGALTSGVHTFPAVLQSSGLYSLSSVVTVPSSSLGTQTYICNVNHKPSNTKVDKKVEPKSCDKTHTCPPCPAPELLGGPSVFLFPPKPKDTLMISRTPEVTCVVVDVSHEDPEVKFNWYVDGVEVHNAKTKPCEEQYGSTYRCVSVLTVLHQDWLNGKEYKCKVSNKALPAPIEKTISKAKGQPREPQVYTLPPSREEMTKNQVSLTCLVKGFYPSDIAVEWESNGQPENNYKTTPPVLDSDGSFFLYSKLTVDKSRWQQGNVFSCSVMHEALHNHYTQKSLSLSPGK

SEQ ID NO: 321 - protein, 231 aa, Artificial Sequence
  Synthetic peptide
MAWALLLLTLLTQGTGSWASYELTQPPSVSVSPGQTASITCSGDKLGDKYACWYQQKPGQSPVLVIYQDRKRPSGIPERFSGSNSGNTATLTISGTQAMDEADYYCQAWDSSTEVFGGGTKLTVLGQPKAAPSVTLFPPSSEELQANKATLVCLISDFYPGAVTVAWKADSSPVKAGVETTTPSKQSNNKYAASSYLSLTPEQWKSHRSYSCQVTHEGSTVEKTVAPTECS

SEQ ID NO: 322 - protein, 5 aa, Artificial Sequence
  Synthetic peptide
SYDMS

SEQ ID NO: 323 - protein, 17 aa, Artificial Sequence
  Synthetic peptide
LISGGGSNTYYADSVKG

SEQ ID NO: 324 - protein, 11 aa, Artificial Sequence
  Synthetic peptide
PSGHYFYAMDV

SEQ ID NO: 325 - protein, 11 aa, Artificial Sequence
  Synthetic peptide
RASQGISNWLA

SEQ ID NO: 326 - protein, 7 aa, Artificial Sequence
  Synthetic peptide
AASSLQS

SEQ ID NO: 327 - protein, 9 aa, Artificial Sequence
  Synthetic peptide
QQADSFPHT

SEQ ID NO: 328 - protein, 120 aa, Artificial Sequence
  Synthetic peptide
EVQLLESGGGLVQPGGALRLSCAASGFTFSSYDMSWVRQAPGKGLEWVSLISGGGSNTYYADSVKGRFTISRDNSKNTLYLQMNSLRAEDTAVYFCASPSGHYFYAMDVWGQGTTVTVSS

SEQ ID NO: 329 - protein, 107 aa, Artificial Sequence
  Synthetic peptide
DIQMTQSPSSVSASVGDRVTITCRASQGISNWLAWYQQKPGKAPKLLIFAASSLQSGVPSRFGGSGSGTDFTFTISSLQPEDFATYYCQQADSFPHTFGGGTKVEIK

SEQ ID NO: 330 - protein, 472 aa, Artificial Sequence
  Synthetic peptide
MDMRVPAQLLGLLLLWLRGARCEVQLLESGGGLVQPGGALRLSCAASGFTFSSYDMSWVRQAPGKGLEWVSLISGGGSNTYYADSVKGRFTISRDNSKNTLYLQMNSLRAEDTAVYFCASPSGHYFYAMDVWGQGTTVTVSSASTKGPSVFPLAPSSKSTSGGTAALGCLVKDYFPEPVTVSWNSGALTSGVHTFPAVLQSSGLYSLSSVVTVPSSSLGTQTYICNVNHKPSNTKVDKKVEPKSCDKTHTCPPCPAPELLGGPSVFLFPPKPKDTLMISRTPEVTCVVVDVSHEDPEVKFNWYVDGVEVHNAKTKPCEEQYGSTYRCVSVLTVLHQDWLNGKEYKCKVSNKALPAPIEKTISKAKGQPREPQVYTLPPSREEMTKNQVSLTCLVKGFYPSDIAVEWESNGQPENNYKTTPPVLDSDGSFFLYSKLTVDKSRWQQGNVFSCSVMHEALHNHYTQKSLSLSPGK

SEQ ID NO: 331 - protein, 236 aa, Artificial Sequence
  Synthetic peptide
MDMRVPAQLLGLLLLWLRGARCDIQMTQSPSSVSASVGDRVTITCRASQGISNWLAWYQQKPGKAPKLLIFAASSLQSGVPSRFGGSGSGTDFTFTISSLQPEDFATYYCQQADSFPHTFGGGTKVEIKRTVAAPSVFIFPPSDEQLKSGTASVVCLLNNFYPREAKVQWKVDNALQSGNSQESVTEQDSKDSTYSLSSTLTLSKADYEKHKVYACEVTHQGLSSPVTKSFNRGEC

SEQ ID NO: 332 - protein, 5 aa, Artificial Sequence
  Synthetic peptide
DYSMS

SEQ ID NO: 333 - protein, 17 aa, Artificial Sequence
  Synthetic peptide
GINWNGGRTRYADSVKG

SEQ ID NO: 334 - protein, 12 aa, Artificial Sequence
  Synthetic peptide
EFNNFESNWFDP

SEQ ID NO: 335 - protein, 11 aa, Artificial Sequence
  Synthetic peptide
SGDALPKKYAY

SEQ ID NO: 336 - protein, 7 aa, Artificial Sequence
  Synthetic peptide
EDSKRPS

SEQ ID NO: 337 - protein, 11 aa, Artificial Sequence
  Synthetic peptide
YSTDSSGNHRV

SEQ ID NO: 338 - protein, 121 aa, Artificial Sequence
  Synthetic peptide
EVQLVESGGSVVRPGGSLRLSCAASGFTVDDYSMSWVRQVPGKGLEWVSGINWNGGRTRYADSVKGRFTISRDSAKNSLYLQMNSLRAEDTALYYCAREFNNFESNWFDPWGQGTLVTVSS

SEQ ID NO: 339 - protein, 108 aa, Artificial Sequence
  Synthetic peptide
SYELTQPPSVSVSPGQTARITCSGDALPKKYAYWYQQKSGQAPVLVISEDSKRPSGIPERFSGSSSGTMATLTISGAQVEDEADYYCYSTDSSGNHRVFGGGTKLTVL

SEQ ID NO: 340 - protein, 473 aa, Artificial Sequence
  Synthetic peptide
MDMRVPAQLLGLLLLWLRGARCEVQLVESGGSVVRPGGSLRLSCAASGFTVDDYSMSWVRQVPGKGLEWVSGINWNGGRTRYADSVKGRFTISRDSAKNSLYLQMNSLRAEDTALYYCAREFNNFESNWFDPWGQGTLVTVSSASTKGPSVFPLAPSSKSTSGGTAALGCLVKDYFPEPVTVSWNSGALTSGVHTFPAVLQSSGLYSLSSVVTVPSSSLGTQTYICNVNHKPSNTKVDKKVEPKSCDKTHTCPPCPAPELLGGPSVFLFPPKPKDTLMISRTPEVTCVVVDVSHEDPEVKFNWYVDGVEVHNAKTKPCEEQYGSTYRCVSVLTVLHQDWLNGKEYKCKVSNKALPAPIEKTISKAKGQPREPQVYTLPPSREEMTKNQVSLTCLVKGFYPSDIAVEWESNGQPENNYKTTPPVLDSDGSFFLYSKLTVDKSRWQQGNVFSCSVMHEALHNHYTQKSLSLSPGK

SEQ ID NO: 341 - protein, 233 aa, Artificial Sequence
  Synthetic peptide
MAWALLLLTLLTQGTGSWASYELTQPPSVSVSPGQTARITCSGDALPKKYAYWYQQKSGQAPVLVISEDSKRPSGIPERFSGSSSGTMATLTISGAQVEDEADYYCYSTDSSGNHRVFGGGTKLTVLGQPKAAPSVTLFPPSSEELQANKATLVCLISDFYPGAVTVAWKADSSPVKAGVETTTPSKQSNNKYAASSYLSLTPEQWKSHRSYSCQVTHEGSTVEKTVAPTECS

SEQ ID NO: 342 - protein, 5 aa, Artificial Sequence
  Synthetic peptide
SYDMS

SEQ ID NO: 343 - protein, 17 aa, Artificial Sequence
  Synthetic peptide
LISGGGSNTYYAESVKG

SEQ ID NO: 344 - protein, 11 aa, Artificial Sequence
  Synthetic peptide
PSGHYFYAMDV

SEQ ID NO: 345 - protein, 11 aa, Artificial Sequence
  Synthetic peptide
RASQGISNWLA

SEQ ID NO: 346 - protein, 7 aa, Artificial Sequence
  Synthetic peptide
AASSLQS

SEQ ID NO: 347 - protein, 9 aa, Artificial Sequence
  Synthetic peptide
QQAESFPHT

SEQ ID NO: 348 - protein, 120 aa, Artificial Sequence
  Synthetic peptide
EVQLLESGGGLVQPGGSLRLSCAASGFTFSSYDMSWVRQAPGKGLEWVSLISGGGSNTYYAESVKGRFTISRDNSKNTLYLQMNSLRAEDTAVYFCASPSGHYFYAMDVWGQGTTVTVSS

SEQ ID NO: 349 - protein, 107 aa, Artificial Sequence
  Synthetic peptide
DIQMTQSPSSVSASVGDRVTITCRASQGISNWLAWYQQKPGKAPKLLIFAASSLQSGVPSRFSGSGSGTDFTLTISSLQPEDFATYYCQQAESFPHTFGGGTKVEIK

SEQ ID NO: 350 - protein, 472 aa, Artificial Sequence
  Synthetic peptide
MDMRVPAQLLGLLLLWLRGARCEVQLLESGGGLVQPGGSLRLSCAASGFTFSSYDMSWVRQAPGKGLEWVSLISGGGSNTYYAESVKGRFTISRDNSKNTLYLQMNSLRAEDTAVYFCASPSGHYFYAMDVWGQGTTVTVSSASTKGPSVFPLAPSSKSTSGGTAALGCLVKDYFPEPVTVSWNSGALTSGVHTFPAVLQSSGLYSLSSVVTVPSSSLGTQTYICNVNHKPSNTKVDKKVEPKSCDKTHTCPPCPAPELLGGPSVFLFPPKPKDTLMISRTPEVTCVVVDVSHEDPEVKFNWYVDGVEVHNAKTKPCEEQYGSTYRCVSVLTVLHQDWLNGKEYKCKVSNKALPAPIEKTISKAKGQPREPQVYTLPPSREEMTKNQVSLTCLVKGFYPSDIAVEWESNGQPENNYKTTPPVLDSDGSFFLYSKLTVDKSRWQQGNVFSCSVMHEALHNHYTQKSLSLSPGK

SEQ ID NO: 351 - protein, 236 aa, Artificial Sequence
  Synthetic peptide
MDMRVPAQLLGLLLLWLRGARCDIQMTQSPSSVSASVGDRVTITCRASQGISNWLAWYQQKPGKAPKLLIFAASSLQSGVPSRFSGSGSGTDFTLTISSLQPEDFATYYCQQAESFPHTFGGGTKVEIKRTVAAPSVFIFPPSDEQLKSGTASVVCLLNNFYPREAKVQWKVDNALQSGNSQESVTEQDSKDSTYSLSSTLTLSKADYEKHKVYACEVTHQGLSSPVTKSFNRGEC

SEQ ID NO: 352 - protein, 5 aa, Artificial Sequence
  Synthetic peptide
SYDMS

SEQ ID NO: 353 - protein, 17 aa, Artificial Sequence
  Synthetic peptide
LISGGGSQTYYAESVKG

SEQ ID NO: 354 - protein, 11 aa, Artificial Sequence
  Synthetic peptide
PSGHYFYAMDV

SEQ ID NO: 355 - protein, 11 aa, Artificial Sequence
  Synthetic peptide
RASQGISNWLA

SEQ ID NO: 356 - protein, 7 aa, Artificial Sequence
  Synthetic peptide
AASSLQS

SEQ ID NO: 357 - protein, 9 aa, Artificial Sequence
  Synthetic peptide
QQAESFPHT

SEQ ID NO: 358 - protein, 120 aa, Artificial Sequence
  Synthetic peptide
EVQLLESGGGLVQPGGSLRLSCAASGFTFSSYDMSWVRQAPGKGLEWVSLISGGGSQTYYAESVKGRFTISRDNSKNTLYLQMNSLRAEDTAVYFCASPSGHYFYAMDVWGQGTTVTVSS

SEQ ID NO: 359 - protein, 107 aa, Artificial Sequence; identical to SEQ ID NO: 349
  Synthetic peptide

SEQ ID NO: 360 - protein, 472 aa, Artificial Sequence
  Synthetic peptide
MDMRVPAQLLGLLLLWLRGARCEVQLLESGGGLVQPGGSLRLSCAASGFTFSSYDMSWVRQAPGKGLEWVSLISGGGSQTYYAESVKGRFTISRDNSKNTLYLQMNSLRAEDTAVYFCASPSGHYFYAMDVWGQGTTVTVSSASTKGPSVFPLAPSSKSTSGGTAALGCLVKDYFPEPVTVSWNSGALTSGVHTFPAVLQSSGLYSLSSVVTVPSSSLGTQTYICNVNHKPSNTKVDKKVEPKSCDKTHTCPPCPAPELLGGPSVFLFPPKPKDTLMISRTPEVTCVVVDVSHEDPEVKFNWYVDGVEVHNAKTKPCEEQYGSTYRCVSVLTVLHQDWLNGKEYKCKVSNKALPAPIEKTISKAKGQPREPQVYTLPPSREEMTKNQVSLTCLVKGFYPSDIAVEWESNGQPENNYKTTPPVLDSDGSFFLYSKLTVDKSRWQQGNVFSCSVMHEALHNHYTQKSLSLSPGK

SEQ ID NO: 361 - protein, 236 aa, Artificial Sequence; identical to SEQ ID NO: 351
  Synthetic peptide

SEQ ID NO: 362 - protein, 5 aa, Artificial Sequence
  Synthetic peptide
NYGMH

SEQ ID NO: 363 - protein, 17 aa, Artificial Sequence
  Synthetic peptide
LIWYDASKKYYAESVKG

SEQ ID NO: 364 - protein, 16 aa, Artificial Sequence
  Synthetic peptide
DPSSLTGSTGYYGMDV

SEQ ID NO: 365 - protein, 11 aa, Artificial Sequence
  Synthetic peptide
SGDKLGDKYAS

SEQ ID NO: 366 - protein, 7 aa, Artificial Sequence
  Synthetic peptide
QDRKRPS

SEQ ID NO: 367 - protein, 9 aa, Artificial Sequence
  Synthetic peptide
QAFESSTEV

SEQ ID NO: 368 - protein, 125 aa, Artificial Sequence
  Synthetic peptide
QVQLVESGGGVVQPGRSLRLSCAASGFTFSNYGMHWVRQAPGKGLEWVALIWYDASKKYYAESVKGRFTISRDNSKNTLYLQMNSLRAEDTAAYYCARDPSSLTGSTGYYGMDVWGQGTTVTVSS

SEQ ID NO: 369 - protein, 106 aa, Artificial Sequence
  Synthetic peptide
SYELTQPPSVSVSPGQTASITCSGDKLGDKYASWYQQKPGQSPVLVIYQDRKRPSGIPERFSGSNSGNTATLTISGTQAMDEADYYCQAFESSTEVFGGGTKLTVL

SEQ ID NO: 370 - protein, 477 aa, Artificial Sequence
  Synthetic peptide
MDMRVPAQLLGLLLLWLRGARCQVQLVESGGGVVQPGRSLRLSCAASGFTFSNYGMHWVRQAPGKGLEWVALIWYDASKKYYAESVKGRFTISRDNSKNTLYLQMNSLRAEDTAAYYCARDPSSLTGSTGYYGMDVWGQGTTVTVSSASTKGPSVFPLAPSSKSTSGGTAALGCLVKDYFPEPVTVSWNSGALTSGVHTFPAVLQSSGLYSLSSVVTVPSSSLGTQTYICNVNHKPSNTKVDKKVEPKSCDKTHTCPPCPAPELLGGPSVFLFPPKPKDTLMISRTPEVTCVVVDVSHEDPEVKFNWYVDGVEVHNAKTKPCEEQYGSTYRCVSVLTVLHQDWLNGKEYKCKVSNKALPAPIEKTISKAKGQPREPQVYTLPPSREEMTKNQVSLTCLVKGFYPSDIAVEWESNGQPENNYKTTPPVLDSDGSFFLYSKLTVDKSRWQQGNVFSCSVMHEALHNHYTQKSLSLSPGK

SEQ ID NO: 371 - protein, 231 aa, Artificial Sequence
  Synthetic peptide
MAWALLLLTLLTQGTGSWASYELTQPPSVSVSPGQTASITCSGDKLGDKYASWYQQKPGQSPVLVIYQDRKRPSGIPERFSGSNSGNTATLTISGTQAMDEADYYCQAFESSTEVFGGGTKLTVLGQPKAAPSVTLFPPSSEELQANKATLVCLISDFYPGAVTVAWKADSSPVKAGVETTTPSKQSNNKYAASSYLSLTPEQWKSHRSYSCQVTHEGSTVEKTVAPTECS

SEQ ID NO: 372 - protein, 5 aa, Artificial Sequence
  Synthetic peptide
DYSMS

SEQ ID NO: 373 - protein, 17 aa, Artificial Sequence
  Synthetic peptide
GINWNGGRTRYADAVKG

SEQ ID NO: 374 - protein, 12 aa, Artificial Sequence
  Synthetic peptide
EFNNFESNWFDP

SEQ ID NO: 375 - protein, 11 aa, Artificial Sequence
  Synthetic peptide
SGDALPKKYAY

SEQ ID NO: 376 - protein, 7 aa, Artificial Sequence
  Synthetic peptide
EDAKRPS

SEQ ID NO: 377 - protein, 11 aa, Artificial Sequence
  Synthetic peptide
YSTDASGNHRV

SEQ ID NO: 378 - protein, 121 aa, Artificial Sequence
  Synthetic peptide
EVQLVESGGSVVRPGGSLRLSCAASGFTVDDYSMSWVRQVPGKGLEWVSGINWNGGRTRYADAVKGRFTISRDSAKNSLYLQMNSLRAEDTALYYCAREFNNFESNWFDPWGQGTLVTVSS

SEQ ID NO: 379 - protein, 108 aa, Artificial Sequence
  Synthetic peptide
SYELTQPPSVSVSPGQTARITCSGDALPKKYAYWYQQKPGQAPVLVISEDAKRPSGIPERFSGSSSGTMATLTISGAQVEDEADYYCYSTDASGNHRVFGGGTKLTVL

SEQ ID NO: 380 - protein, 473 aa, Artificial Sequence
  Synthetic peptide
MDMRVPAQLLGLLLLWLRGARCEVQLVESGGSVVRPGGSLRLSCAASGFTVDDYSMSWVRQVPGKGLEWVSGINWNGGRTRYADAVKGRFTISRDSAKNSLYLQMNSLRAEDTALYYCAREFNNFESNWFDPWGQGTLVTVSSASTKGPSVFPLAPSSKSTSGGTAALGCLVKDYFPEPVTVSWNSGALTSGVHTFPAVLQSSGLYSLSSVVTVPSSSLGTQTYICNVNHKPSNTKVDKKVEPKSCDKTHTCPPCPAPELLGGPSVFLFPPKPKDTLMISRTPEVTCVVVDVSHEDPEVKFNWYVDGVEVHNAKTKPCEEQYGSTYRCVSVLTVLHQDWLNGKEYKCKVSNKALPAPIEKTISKAKGQPREPQVYTLPPSREEMTKNQVSLTCLVKGFYPSDIAVEWESNGQPENNYKTTPPVLDSDGSFFLYSKLTVDKSRWQQGNVFSCSVMHEALHNHYTQKSLSLSPGK

SEQ ID NO: 381 - protein, 233 aa, Artificial Sequence
  Synthetic peptide
MAWALLLLTLLTQGTGSWASYELTQPPSVSVSPGQTARITCSGDALPKKYAYWYQQKPGQAPVLVISEDAKRPSGIPERFSGSSSGTMATLTISGAQVEDEADYYCYSTDASGNHRVFGGGTKLTVLGQPKAAPSVTLFPPSSEELQANKATLVCLISDFYPGAVTVAWKADSSPVKAGVETTTPSKQSNNKYAASSYLSLTPEQWKSHRSYSCQVTHEGSTVEKTVAPTECS

SEQ ID NO: 382 - protein, 5 aa, Artificial Sequence
  Synthetic peptide
DYSMS

SEQ ID NO: 383 - protein, 17 aa, Artificial Sequence
  Synthetic peptide
GINWNAGRTRYADAVKG

SEQ ID NO: 384 - protein, 12 aa, Artificial Sequence
  Synthetic peptide
EFNNFESNWFDP

SEQ ID NO: 385 - protein, 11 aa, Artificial Sequence
  Synthetic peptide
SGDALPKKYAY

SEQ ID NO: 386 - protein, 7 aa, Artificial Sequence
  Synthetic peptide
EDAKRPS

SEQ ID NO: 387 - protein, 11 aa, Artificial Sequence
  Synthetic peptide
YSTDASGNHRV

SEQ ID NO: 388 - protein, 121 aa, Artificial Sequence
  Synthetic peptide
EVQLVESGGSVVRPGGSLRLSCAASGFTVDDYSMSWVRQVPGKGLEWVSGINWNAGRTRYADAVKGRFTISRDSAKNSLYLQMNSLRAEDTALYYCAREFNNFESNWFDPWGQGTLVTVSS

SEQ ID NO: 389 - protein, 108 aa, Artificial Sequence; identical to SEQ ID NO: 379
  Synthetic peptide

SEQ ID NO: 390 - protein, 473 aa, Artificial Sequence
  Synthetic peptide
MDMRVPAQLLGLLLLWLRGARCEVQLVESGGSVVRPGGSLRLSCAASGFTVDDYSMSWVRQVPGKGLEWVSGINWNAGRTRYADAVKGRFTISRDSAKNSLYLQMNSLRAEDTALYYCAREFNNFESNWFDPWGQGTLVTVSSASTKGPSVFPLAPSSKSTSGGTAALGCLVKDYFPEPVTVSWNSGALTSGVHTFPAVLQSSGLYSLSSVVTVPSSSLGTQTYICNVNHKPSNTKVDKKVEPKSCDKTHTCPPCPAPELLGGPSVFLFPPKPKDTLMISRTPEVTCVVVDVSHEDPEVKFNWYVDGVEVHNAKTKPCEEQYGSTYRCVSVLTVLHQDWLNGKEYKCKVSNKALPAPIEKTISKAKGQPREPQVYTLPPSREEMTKNQVSLTCLVKGFYPSDIAVEWESNGQPENNYKTTPPVLDSDGSFFLYSKLTVDKSRWQQGNVFSCSVMHEALHNHYTQKSLSLSPGK

SEQ ID NO: 391 - protein, 233 aa, Artificial Sequence; identical to SEQ ID NO: 381
  Synthetic peptide

SEQ ID NO: 392 - DNA, 15 bp, Artificial Sequence
  Synthetic polynucleotide
aactatggcatgcat

SEQ ID NO: 393 - DNA, 51 bp, Artificial Sequence
  Synthetic polynucleotide
cttatctggtatgatggaagtaaaaaatactatgcagactccgtgaagggc

SEQ ID NO: 394 - DNA, 48 bp, Artificial Sequence
  Synthetic polynucleotide
gatccctcgagtctaactggaagtacgggttactacggtatggacgtc

SEQ ID NO: 395 - DNA, 33 bp, Artificial Sequence
  Synthetic polynucleotide
tctggagataaattgggggataaatatgcttgc

SEQ ID NO: 396 - DNA, 21 bp, Artificial Sequence
  Synthetic polynucleotide
caagatagaaagcggccctca

SEQ ID NO: 397 - DNA, 27 bp, Artificial Sequence
  Synthetic polynucleotide
caggcgtgggacagtagcactgaggta

SEQ ID NO: 398 - DNA, 375 bp, Artificial Sequence
  Synthetic polynucleotide
caggtgcagctggtggagtctgggggaggcgtggtccagcctgggaggtccctgagactctcctgtgcagcgtccggcttcaccttcagtaactatggcatgcattgggtccgccaggctccaggcaaggggctggagtgggtggcacttatctggtatgatggaagtaaaaaatactatgcagactccgtgaagggccgattcaccatctccagagacaattccaagaacacgctgtatctgcaaatgaacagcctgagagccgaggacacggctgcgtattactgtgcgagagatccctcgagtctaactggaagtacgggttactacggtatggacgtctggggccaagggaccacggtcaccgtctcctca

SEQ ID NO: 399 - DNA, 318 bp, Artificial Sequence
  Synthetic polynucleotide
tcctatgagctgactcagccaccctcagtgtccgtgtccccaggacagacagccagcatcacctgctctggagataaattgggggataaatatgcttgctggtatcagcagaagccaggccagtcccctgtgctggtcatttatcaagatagaaagcggccctcagggatccctgagcgattctctggctccaactctgggaacacagccactctgaccatcagcgggacccaggctatggatgaggctgactattactgtcaggcgtgggacagtagcactgaggtattcggcggagggaccaagctgaccgtccta

SEQ ID NO: 400 - DNA, 1431 bp, Artificial Sequence
  Synthetic polynucleotide
atggacatgagggtgcccgctcagctcctggggctcctgctgctgtggctgagaggtgcgcgctgtcaggtgcagctggtggagtctgggggaggcgtggtccagcctgggaggtccctgagactctcctgtgcagcgtccggcttcaccttcagtaactatggcatgcattgggtccgccaggctccaggcaaggggctggagtgggtggcacttatctggtatgatggaagtaaaaaatactatgcagactccgtgaagggccgattcaccatctccagagacaattccaagaacacgctgtatctgcaaatgaacagcctgagagccgaggacacggctgcgtattactgtgcgagagatccctcgagtctaactggaagtacgggttactacggtatggacgtctggggccaagggaccacggtcaccgtctcctcagcctccaccaagggcccatcggtcttccccctggcaccctcctccaagagcacctctgggggcacagcggccctgggctgcctggtcaaggactacttccccgaaccggtgacggtgtcgtggaactcaggcgccctgaccagcggcgtgcacaccttcccggctgtcctacagtcctcaggactctactccctcagcagcgtggtgaccgtgccctccagcagcttgggcacccagacctacatctgcaacgtgaatcacaagcccagcaacaccaaggtggacaagaaagttgagcccaaatcttgtgacaaaactcacacatgcccaccgtgcccagcacctgaactcctggggggaccgtcagtcttcctcttccccccaaaacccaaggacaccctcatgatctcccggacccctgaggtcacatgcgtggtggtggacgtgagccacgaagaccctgaggtcaagttcaactggtacgtggacggcgtggaggtgcataatgccaagacaaagccgtgcgaggagcagtacggcagcacgtaccgttgcgtcagcgtcctcaccgtcctgcaccaggactggctgaatggcaaggagtacaagtgcaaggtgtccaacaaagccctcccagcccccatcgagaaaaccatctccaaagccaaagggcagccccgagaaccacaggtgtacaccctgcccccatcccgggaggagatgaccaagaaccaggtcagcctgacctgcctggtcaaaggcttctatcccagcgacatcgccgtggagtgggagagcaatgggcagccggagaacaactacaagaccacgcctcccgtgctggactccgacggctccttcttcctctatagcaagctcaccgtggacaagagcaggtggcagcaggggaacgtcttctcatgctccgtgatgcatgaggctctgcacaaccactacacgcagaagagcctctccctgtctccgggtaaa

SEQ ID NO: 401 - DNA, 693 bp, Artificial Sequence
  Synthetic polynucleotide
atggcctgggctctgctgctcctcaccctcctcactcagggcacagggtcctgggcctcctatgagctgactcagccaccctcagtgtccgtgtccccaggacagacagccagcatcacctgctctggagataaattgggggataaatatgcttgctggtatcagcagaagccaggccagtcccctgtgctggtcatttatcaagatagaaagcggccctcagggatccctgagcgattctctggctccaactctgggaacacagccactctgaccatcagcgggacccaggctatggatgaggctgactattactgtcaggcgtgggacagtagcactgaggtattcggcggagggaccaagctgaccgtcctaggtcagcccaaggctgcaccctcggtcactctgttcccgccctcctctgaggagcttcaagccaacaaggccacactggtgtgtctcatcagtgacttctacccgggagccgtgacagtggcctggaaggcagatagcagccccgtcaaggcgggagtggaaaccaccacaccctccaaacaaagcaacaacaagtacgcggccagcagctatctgagcctgacgcctgagcagtggaagtcccacagaagctacagctgccaggtcacgcatgaagggagcaccgtggagaagacagtggcccctacagaatgttca

SEQ ID NO: 402 - DNA, 15 bp, Artificial Sequence
  Synthetic polynucleotide
agctatgacatgagc

SEQ ID NO: 403 - DNA, 51 bp, Artificial Sequence
  Synthetic polynucleotide
cttattagtggtggtggtagtaacacatactacgcagactccgtgaagggc

SEQ ID NO: 404 - DNA, 33 bp, Artificial Sequence
  Synthetic polynucleotide
cccagtggccactacttctacgctatggacgtc

SEQ ID NO: 405 - DNA, 33 bp, Artificial Sequence
  Synthetic polynucleotide
cgggcgagtcagggtattagcaactggttagcc

SEQ ID NO: 406 - DNA, 21 bp, Artificial Sequence
  Synthetic polynucleotide
gctgcatccagtttgcaaagt

SEQ ID NO: 407 - DNA, 27 bp, Artificial Sequence
  Synthetic polynucleotide
caacaggctgacagtttccctcacact

SEQ ID NO: 408 - DNA, 360 bp, Artificial Sequence
  Synthetic polynucleotide
gaggtgcagctgttggagtctgggggaggcttggtacagcctgggggggccctgagactctcctgtgcagcctctggattcacctttagcagctatgacatgagctgggtccgccaggctccagggaaggggctggaatgggtctcacttattagtggtggtggtagtaacacatactacgcagactccgtgaagggccggttcaccatctccagagacaattccaagaacacgctgtatctgcaaatgaacagcctgagagccgaggacacggccgtatatttctgtgcgtcccccagtggccactacttctacgctatggacgtctggggccaagggaccacggtcaccgtctcctca

SEQ ID NO: 409 - DNA, 321 bp, Artificial Sequence
  Synthetic polynucleotide
gacatccagatgacccagtctccatcttccgtgtctgcatctgttggagacagagtcaccatcacttgtcgggcgagtcagggtattagcaactggttagcctggtatcagcagaaaccagggaaagcccctaagctcctgatctttgctgcatccagtttgcaaagtggggtcccatcaaggttcggcggcagtggatctgggacagatttcaccttcaccatcagcagcctgcagcctgaagattttgcaacttactattgtcaacaggctgacagtttccctcacactttcggcggagggaccaaggtggagatcaaa

SEQ ID NO: 410 - DNA, 1416 bp, Artificial Sequence
  Synthetic polynucleotide
atggacatgagggtgcccgctcagctcctggggctcctgctgctgtggctgagaggtgcgcgctgtgaggtgcagctgttggagtctgggggaggcttggtacagcctgggggggccctgagactctcctgtgcagcctctggattcacctttagcagctatgacatgagctgggtccgccaggctccagggaaggggctggaatgggtctcacttattagtggtggtggtagtaacacatactacgcagactccgtgaagggccggttcaccatctccagagacaattccaagaacacgctgtatctgcaaatgaacagcctgagagccgaggacacggccgtatatttctgtgcgtcccccagtggccactacttctacgctatggacgtctggggccaagggaccacggtcaccgtctcctcagcctccaccaagggcccatcggtcttccccctggcaccctcctccaagagcacctctgggggcacagcggccctgggctgcctggtcaaggactacttccccgaaccggtgacggtgtcgtggaactcaggcgccctgaccagcggcgtgcacaccttcccggctgtcctacagtcctcaggactctactccctcagcagcgtggtgaccgtgccctccagcagcttgggcacccagacctacatctgcaacgtgaatcacaagcccagcaacaccaaggtggacaagaaagttgagcccaaatcttgtgacaaaactcacacatgcccaccgtgcccagcacctgaactcctggggggaccgtcagtcttcctcttccccccaaaacccaaggacaccctcatgatctcccggacccctgaggtcacatgcgtggtggtggacgtgagccacgaagaccctgaggtcaagttcaactggtacgtggacggcgtggaggtgcataatgccaagacaaagccgtgcgaggagcagtacggcagcacgtaccgttgcgtcagcgtcctcaccgtcctgcaccaggactggctgaatggcaaggagtacaagtgcaaggtgtccaacaaagccctcccagcccccatcgagaaaaccatctccaaagccaaagggcagccccgagaaccacaggtgtacaccctgcccccatcccgggaggagatgaccaagaaccaggtcagcctgacctgcctggtcaaaggcttctatcccagcgacatcgccgtggagtgggagagcaatgggcagccggagaacaactacaagaccacgcctcccgtgctggactccgacggctccttcttcctctatagcaagctcaccgtggacaagagcaggtggcagcaggggaacgtcttctcatgctccgtgatgcatgaggctctgcacaaccactacacgcagaagagcctctccctgtctccgggtaaa

SEQ ID NO: 411 - DNA, 708 bp, Artificial Sequence
  Synthetic polynucleotide
atggacatgagggtgcccgctcagctcctggggctcctgctgctgtggctgagaggtgcgcgctgtgacatccagatgacccagtctccatcttccgtgtctgcatctgttggagacagagtcaccatcacttgtcgggcgagtcagggtattagcaactggttagcctggtatcagcagaaaccagggaaagcccctaagctcctgatctttgctgcatccagtttgcaaagtggggtcccatcaaggttcggcggcagtggatctgggacagatttcaccttcaccatcagcagcctgcagcctgaagattttgcaacttactattgtcaacaggctgacagtttccctcacactttcggcggagggaccaaggtggagatcaaacgaacggtggctgcaccatctgtcttcatcttcccgccatctgatgagcagttgaaatctggaactgcctctgttgtgtgcctgctgaataacttctatcccagagaggccaaagtacagtggaaggtggataacgccctccaatcgggtaactcccaggagagtgtcacagagcaggacagcaaggacagcacctacagcctcagcagcaccctgacgctgagcaaagcagactacgagaaacacaaagtctacgcctgcgaagtcacccatcagggcctgagctcgcccgtcacaaagagcttcaacaggggagagtgt

SEQ ID NO: 412 - DNA, 15 bp, Artificial Sequence
  Synthetic polynucleotide
gattatagcatgagc

SEQ ID NO: 413 - DNA, 51 bp, Artificial Sequence
  Synthetic polynucleotide
ggcattaattggaatggtggtaggacacgttatgcagactctgtgaagggc

SEQ ID NO: 414 - DNA, 36 bp, Artificial Sequence
  Synthetic polynucleotide
gaattcaataacttcgagtccaactggttcgacccc

SEQ ID NO: 415 - DNA, 33 bp, Artificial Sequence
  Synthetic polynucleotide
tctggagatgcattgccaaaaaaatatgcttat

SEQ ID NO: 416 - DNA, 21 bp, Artificial Sequence
  Synthetic polynucleotide
gaggacagcaaacgaccctcc

SEQ ID NO: 417 - DNA, 33 bp, Artificial Sequence
  Synthetic polynucleotide
tactcaacagacagcagtggtaatcatagggtg

SEQ ID NO: 418 - DNA, 363 bp, Artificial Sequence
  Synthetic polynucleotide
gaggtgcagctggtggagtctgggggaagtgtggtacggccgggggggtccctgagactctcctgtgcagcctctggattcaccgttgatgattatagcatgagctgggtccgccaagttccagggaaggggctggagtgggtctctggcattaattggaatggtggtaggacacgttatgcagactctgtgaagggccgattcaccatctccagagacagcgccaaaaactccctgtatctgcaaatgaacagtctgagagccgaggatacggccttatattactgtgcgagagaattcaataacttcgagtccaactggttcgacccctggggccagggaaccctggtcaccgtctcctca

SEQ ID NO: 419 - DNA, 324 bp, Artificial Sequence
  Synthetic polynucleotide
tcctatgagctgacacagccaccctcggtgtcagtgtccccaggacaaacggccaggatcacctgctctggagatgcattgccaaaaaaatatgcttattggtaccagcagaagtcaggccaggcccctgtgctggtcatctctgaggacagcaaacgaccctccgggatccctgagagattctctggctccagctcagggacaatggccaccttgactatcagtggggcccaggtggaggatgaagctgactactactgttactcaacagacagcagtggtaatcatagggtgttcggcggagggaccaagctgaccgtccta

SEQ ID NO: 420 - DNA, 1419 bp, Artificial Sequence
  Synthetic polynucleotide
atggacatgagggtgcccgctcagctcctggggctcctgctgctgtggctgagaggtgcgcgctgtgaggtgcagctggtggagtctgggggaagtgtggtacggccgggggggtccctgagactctcctgtgcagcctctggattcaccgttgatgattatagcatgagctgggtccgccaagttccagggaaggggctggagtgggtctctggcattaattggaatggtggtaggacacgttatgcagactctgtgaagggccgattcaccatctccagagacagcgccaaaaactccctgtatctgcaaatgaacagtctgagagccgaggatacggccttatattactgtgcgagagaattcaataacttcgagtccaactggttcgacccctggggccagggaaccctggtcaccgtctcctcagcctccaccaagggcccatcggtcttccccctggcaccctcctccaagagcacctctgggggcacagcggccctgggctgcctggtcaaggactacttccccgaaccggtgacggtgtcgtggaactcaggcgccctgaccagcggcgtgcacaccttcccggctgtcctacagtcctcaggactctactccctcagcagcgtggtgaccgtgccctccagcagcttgggcacccagacctacatctgcaacgtgaatcacaagcccagcaacaccaaggtggacaagaaagttgagcccaaatcttgtgacaaaactcacacatgcccaccgtgcccagcacctgaactcctggggggaccgtcagtcttcctcttccccccaaaacccaaggacaccctcatgatctcccggacccctgaggtcacatgcgtggtggtggacgtgagccacgaagaccctgaggtcaagttcaactggtacgtggacggcgtggaggtgcataatgccaagacaaagccgtgcgaggagcagtacggcagcacgtaccgttgcgtcagcgtcctcaccgtcctgcaccaggactggctgaatggcaaggagtacaagtgcaaggtgtccaacaaagccctcccagcccccatcgagaaaaccatctccaaagccaaagggcagccccgagaaccacaggtgtacaccctgcccccatcccgggaggagatgaccaagaaccaggtcagcctgacctgcctggtcaaaggcttctatcccagcgacatcgccgtggagtgggagagcaatgggcagccggagaacaactacaagaccacgcctcccgtgctggactccgacggctccttcttcctctatagcaagctcaccgtggacaagagcaggtggcagcaggggaacgtcttctcatgctccgtgatgcatgaggctctgcacaaccactacacgcagaagagcctctccctgtctccgggtaaa

SEQ ID NO: 421 - DNA, 699 bp, Artificial Sequence
  Synthetic polynucleotide
atggcctgggctctgctgctcctcaccctcctcactcagggcacagggtcctgggcctcctatgagctgacacagccaccctcggtgtcagtgtccccaggacaaacggccaggatcacctgctctggagatgcattgccaaaaaaatatgcttattggtaccagcagaagtcaggccaggcccctgtgctggtcatctctgaggacagcaaacgaccctccgggatccctgagagattctctggctccagctcagggacaatggccaccttgactatcagtggggcccaggtggaggatgaagctgactactactgttactcaacagacagcagtggtaatcatagggtgttcggcggagggaccaagctgaccgtcctaggtcagcccaaggctgcaccctcggtcactctgttcccgccctcctctgaggagcttcaagccaacaaggccacactggtgtgtctcatcagtgacttctacccgggagccgtgacagtggcctggaaggcagatagcagccccgtcaaggcgggagtggaaaccaccacaccctccaaacaaagcaacaacaagtacgcggccagcagctatctgagcctgacgcctgagcagtggaagtcccacagaagctacagctgccaggtcacgcatgaagggagcaccgtggagaagacagtggcccctacagaatgttca

SEQ ID NO: 422 - DNA, 15 bp, Artificial Sequence
  Synthetic polynucleotide
agctatgacatgagc

SEQ ID NO: 423 - DNA, 51 bp, Artificial Sequence
  Synthetic polynucleotide
cttattagtggtggtggtagtaacacatactacgcagaatccgtgaagggc

SEQ ID NO: 424 - DNA, 33 bp, Artificial Sequence; identical to SEQ ID NO: 404
  Synthetic polynucleotide

SEQ ID NO: 425 - DNA, 33 bp, Artificial Sequence; identical to SEQ ID NO: 405
  Synthetic polynucleotide

SEQ ID NO: 426 - DNA, 21 bp, Artificial Sequence
  Synthetic polynucleotide
gctgcatccagtttgcaaagt

SEQ ID NO: 427 - DNA, 27 bp, Artificial Sequence
  Synthetic polynucleotide
caacaggctgaaagtttccctcacact

SEQ ID NO: 428 - DNA, 360 bp, Artificial Sequence
  Synthetic polynucleotide
gaggtgcagctgttggagtctgggggaggcttggtacagcctggggggtccctgagactctcctgtgcagcctctggattcacctttagcagctatgacatgagctgggtccgccaggctccagggaaggggctggaatgggtctcacttattagtggtggtggtagtaacacatactacgcagaatccgtgaagggccggttcaccatctccagagacaattccaagaacacgctgtatctgcaaatgaacagcctgagagccgaggacacggccgtatatttctgtgcgtcccccagtggccactacttctacgctatggacgtctggggccaagggaccacggtcaccgtctcctca

SEQ ID NO: 429 - DNA, 321 bp, Artificial Sequence
  Synthetic polynucleotide
gacatccagatgacccagtctccatcttccgtgtctgcatctgttggagacagagtcaccatcacttgtcgggcgagtcagggtattagcaactggttagcctggtatcagcagaaaccagggaaagcccctaagctcctgatctttgctgcatccagtttgcaaagtggggtcccatcaaggttcagcggcagtggatctgggacagatttcaccctcaccatcagcagcctgcagcctgaagattttgcaacttactattgtcaacaggctgaaagtttccctcacactttcggcggagggaccaaggtggagatcaaa

SEQ ID NO: 430 - DNA, 1416 bp, Artificial Sequence
  Synthetic polynucleotide
atggacatgagggtgcccgctcagctcctggggctcctgctgctgtggctgagaggtgcgcgctgtgaggtgcagctgttggagtctgggggaggcttggtacagcctggggggtccctgagactctcctgtgcagcctctggattcacctttagcagctatgacatgagctgggtccgccaggctccagggaaggggctggaatgggtctcacttattagtggtggtggtagtaacacatactacgcagaatccgtgaagggccggttcaccatctccagagacaattccaagaacacgctgtatctgcaaatgaacagcctgagagccgaggacacggccgtatatttctgtgcgtcccccagtggccactacttctacgctatggacgtctggggccaagggaccacggtcaccgtctcctcagcctccaccaagggcccatcggtcttccccctggcaccctcctccaagagcacctctgggggcacagcggccctgggctgcctggtcaaggactacttccccgaaccggtgacggtgtcgtggaactcaggcgccctgaccagcggcgtgcacaccttcccggctgtcctacagtcctcaggactctactccctcagcagcgtggtgaccgtgccctccagcagcttgggcacccagacctacatctgcaacgtgaatcacaagcccagcaacaccaaggtggacaagaaagttgagcccaaatcttgtgacaaaactcacacatgcccaccgtgcccagcacctgaactcctggggggaccgtcagtcttcctcttccccccaaaacccaaggacaccctcatgatctcccggacccctgaggtcacatgcgtggtggtggacgtgagccacgaagaccctgaggtcaagttcaactggtacgtggacggcgtggaggtgcataatgccaagacaaagccgtgcgaggagcagtacggcagcacgtaccgttgcgtcagcgtcctcaccgtcctgcaccaggactggctgaatggcaaggagtacaagtgcaaggtgtccaacaaagccctcccagcccccatcgagaaaaccatctccaaagccaaagggcagccccgagaaccacaggtgtacaccctgcccccatcccgggaggagatgaccaagaaccaggtcagcctgacctgcctggtcaaaggcttctatcccagcgacatcgccgtggagtgggagagcaatgggcagccggagaacaactacaagaccacgcctcccgtgctggactccgacggctccttcttcctctatagcaagctcaccgtggacaagagcaggtggcagcaggggaacgtcttctcatgctccgtgatgcatgaggctctgcacaaccactacacgcagaagagcctctccctgtctccgggtaaa

SEQ ID NO: 431 - DNA, 708 bp, Artificial Sequence
  Synthetic polynucleotide
atggacatgagggtgcccgctcagctcctggggctcctgctgctgtggctgagaggtgcgcgctgtgacatccagatgacccagtctccatcttccgtgtctgcatctgttggagacagagtcaccatcacttgtcgggcgagtcagggtattagcaactggttagcctggtatcagcagaaaccagggaaagcccctaagctcctgatctttgctgcatccagtttgcaaagtggggtcccatcaaggttcagcggcagtggatctgggacagatttcaccctcaccatcagcagcctgcagcctgaagattttgcaacttactattgtcaacaggctgaaagtttccctcacactttcggcggagggaccaaggtggagatcaaacgaacggtggctgcaccatctgtcttcatcttcccgccatctgatgagcagttgaaatctggaactgcctctgttgtgtgcctgctgaataacttctatcccagagaggccaaagtacagtggaaggtggataacgccctccaatcgggtaactcccaggagagtgtcacagagcaggacagcaaggacagcacctacagcctcagcagcaccctgacgctgagcaaagcagactacgagaaacacaaagtctacgcctgcgaagtcacccatcagggcctgagctcgcccgtcacaaagagcttcaacaggggagagtgt

SEQ ID NO: 432 - DNA, 15 bp, Artificial Sequence
  Synthetic polynucleotide
agctatgacatgagc

SEQ ID NO: 433 - DNA, 51 bp, Artificial Sequence
  Synthetic polynucleotide
cttattagtggtggtggtagtcaaacatactacgcagaatccgtgaagggc

SEQ ID NO: 434 - DNA, 33 bp, Artificial Sequence; identical to SEQ ID NO: 404
  Synthetic polynucleotide

SEQ ID NO: 435 - DNA, 33 bp, Artificial Sequence; identical to SEQ ID NO: 405
  Synthetic polynucleotide

SEQ ID NO: 436 - DNA, 21 bp, Artificial Sequence
  Synthetic polynucleotide
gctgcatccagtttgcaaagt

SEQ ID NO: 437 - DNA, 27 bp, Artificial Sequence
  Synthetic polynucleotide
caacaggctgaaagtttccctcacact

SEQ ID NO: 438 - DNA, 360 bp, Artificial Sequence
  Synthetic polynucleotide
gaggtgcagctgttggagtctgggggaggcttggtacagcctggggggtccctgagactctcctgtgcagcctctggattcacctttagcagctatgacatgagctgggtccgccaggctccagggaaggggctggaatgggtctcacttattagtggtggtggtagtcaaacatactacgcagaatccgtgaagggccggttcaccatctccagagacaattccaagaacacgctgtatctgcaaatgaacagcctgagagccgaggacacggccgtatatttctgtgcgtcccccagtggccactacttctacgctatggacgtctggggccaagggaccacggtcaccgtctcctca

SEQ ID NO: 439 - DNA, 321 bp, Artificial Sequence; identical to SEQ ID NO: 429
  Synthetic polynucleotide

SEQ ID NO: 440 - DNA, 1416 bp, Artificial Sequence
  Synthetic polynucleotide
atggacatgagggtgcccgctcagctcctggggctcctgctgctgtggctgagaggtgcgcgctgtgaggtgcagctgttggagtctgggggaggcttggtacagcctggggggtccctgagactctcctgtgcagcctctggattcacctttagcagctatgacatgagctgggtccgccaggctccagggaaggggctggaatgggtctcacttattagtggtggtggtagtcaaacatactacgcagaatccgtgaagggccggttcaccatctccagagacaattccaagaacacgctgtatctgcaaatgaacagcctgagagccgaggacacggccgtatatttctgtgcgtcccccagtggccactacttctacgctatggacgtctggggccaagggaccacggtcaccgtctcctcagcctccaccaagggcccatcggtcttccccctggcaccctcctccaagagcacctctgggggcacagcggccctgggctgcctggtcaaggactacttccccgaaccggtgacggtgtcgtggaactcaggcgccctgaccagcggcgtgcacaccttcccggctgtcctacagtcctcaggactctactccctcagcagcgtggtgaccgtgccctccagcagcttgggcacccagacctacatctgcaacgtgaatcacaagcccagcaacaccaaggtggacaagaaagttgagcccaaatcttgtgacaaaactcacacatgcccaccgtgcccagcacctgaactcctggggggaccgtcagtcttcctcttccccccaaaacccaaggacaccctcatgatctcccggacccctgaggtcacatgcgtggtggtggacgtgagccacgaagaccctgaggtcaagttcaactggtacgtggacggcgtggaggtgcataatgccaagacaaagccgtgcgaggagcagtacggcagcacgtaccgttgcgtcagcgtcctcaccgtcctgcaccaggactggctgaatggcaaggagtacaagtgcaaggtgtccaacaaagccctcccagcccccatcgagaaaaccatctccaaagccaaagggcagccccgagaaccacaggtgtacaccctgcccccatcccgggaggagatgaccaagaaccaggtcagcctgacctgcctggtcaaaggcttctatcccagcgacatcgccgtggagtgggagagcaatgggcagccggagaacaactacaagaccacgcctcccgtgctggactccgacggctccttcttcctctatagcaagctcaccgtggacaagagcaggtggcagcaggggaacgtcttctcatgctccgtgatgcatgaggctctgcacaaccactacacgcagaagagcctctccctgtctccgggtaaa

SEQ ID NO: 441 - DNA, 708 bp, Artificial Sequence; identical to SEQ ID NO: 431
  Synthetic polynucleotide

SEQ ID NO: 442 - DNA, 15 bp, Artificial Sequence
  Synthetic polynucleotide
aactatggcatgcat

SEQ ID NO: 443 - DNA, 51 bp, Artificial Sequence
  Synthetic polynucleotide
cttatctggtatgatgcaagtaaaaaatactatgcagaatccgtgaagggc

SEQ ID NO: 444 - DNA, 48 bp, Artificial Sequence; identical to SEQ ID NO: 394
  Synthetic polynucleotide

SEQ ID NO: 445 - DNA, 33 bp, Artificial Sequence
  Synthetic polynucleotide
tctggagataaattgggggataaatatgcttcc

SEQ ID NO: 446 - DNA, 21 bp, Artificial Sequence
  Synthetic polynucleotide
caagatagaaagcggccctca

SEQ ID NO: 447 - DNA, 27 bp, Artificial Sequence
  Synthetic polynucleotide
caggcgttcgaaagtagcactgaggta

SEQ ID NO: 448 - DNA, 375 bp, Artificial Sequence
  Synthetic polynucleotide
caggtgcagctggtggagtctgggggaggcgtggtccagcctgggaggtccctgagactctcctgtgcagcgtccggcttcaccttcagtaactatggcatgcattgggtccgccaggctccaggcaaggggctggagtgggtggcacttatctggtatgatgcaagtaaaaaatactatgcagaatccgtgaagggccgattcaccatctccagagacaattccaagaacacgctgtatctgcaaatgaacagcctgagagccgaggacacggctgcgtattactgtgcgagagatccctcgagtctaactggaagtacgggttactacggtatggacgtctggggccaagggaccacggtcaccgtctcctca

SEQ ID NO: 449 - DNA, 318 bp, Artificial Sequence
  Synthetic polynucleotide
tcctatgagctgactcagccaccctcagtgtccgtgtccccaggacagacagccagcatcacctgctctggagataaattgggggataaatatgcttcctggtatcagcagaagccaggccagtcccctgtgctggtcatttatcaagatagaaagcggccctcagggatccctgagcgattctctggctccaactctgggaacacagccactctgaccatcagcgggacccaggctatggatgaggctgactattactgtcaggcgttcgaaagtagcactgaggtattcggcggagggaccaagctgaccgtccta

SEQ ID NO: 450 - DNA, 1431 bp, Artificial Sequence
  Synthetic polynucleotide
atggacatgagggtgcccgctcagctcctggggctcctgctgctgtggctgagaggtgcgcgctgtcaggtgcagctggtggagtctgggggaggcgtggtccagcctgggaggtccctgagactctcctgtgcagcgtccggcttcaccttcagtaactatggcatgcattgggtccgccaggctccaggcaaggggctggagtgggtggcacttatctggtatgatgcaagtaaaaaatactatgcagaatccgtgaagggccgattcaccatctccagagacaattccaagaacacgctgtatctgcaaatgaacagcctgagagccgaggacacggctgcgtattactgtgcgagagatccctcgagtctaactggaagtacgggttactacggtatggacgtctggggccaagggaccacggtcaccgtctcctcagcctccaccaagggcccatcggtcttccccctggcaccctcctccaagagcacctctgggggcacagcggccctgggctgcctggtcaaggactacttccccgaaccggtgacggtgtcgtggaactcaggcgccctgaccagcggcgtgcacaccttcccggctgtcctacagtcctcaggactctactccctcagcagcgtggtgaccgtgccctccagcagcttgggcacccagacctacatctgcaacgtgaatcacaagcccagcaacaccaaggtggacaagaaagttgagcccaaatcttgtgacaaaactcacacatgcccaccgtgcccagcacctgaactcctggggggaccgtcagtcttcctcttccccccaaaacccaaggacaccctcatgatctcccggacccctgaggtcacatgcgtggtggtggacgtgagccacgaagaccctgaggtcaagttcaactggtacgtggacggcgtggaggtgcataatgccaagacaaagccgtgcgaggagcagtacggcagcacgtaccgttgcgtcagcgtcctcaccgtcctgcaccaggactggctgaatggcaaggagtacaagtgcaaggtgtccaacaaagccctcccagcccccatcgagaaaaccatctccaaagccaaagggcagccccgagaaccacaggtgtacaccctgcccccatcccgggaggagatgaccaagaaccaggtcagcctgacctgcctggtcaaaggcttctatcccagcgacatcgccgtggagtgggagagcaatgggcagccggagaacaactacaagaccacgcctcccgtgctggactccgacggctccttcttcctctatagcaagctcaccgtggacaagagcaggtggcagcaggggaacgtcttctcatgctccgtgatgcatgaggctctgcacaaccactacacgcagaagagcctctccctgtctccgggtaaa

SEQ ID NO: 451 - DNA, 693 bp, Artificial Sequence
  Synthetic polynucleotide
atggcctgggctctgctgctcctcaccctcctcactcagggcacagggtcctgggcctcctatgagctgactcagccaccctcagtgtccgtgtccccaggacagacagccagcatcacctgctctggagataaattgggggataaatatgcttcctggtatcagcagaagccaggccagtcccctgtgctggtcatttatcaagatagaaagcggccctcagggatccctgagcgattctctggctccaactctgggaacacagccactctgaccatcagcgggacccaggctatggatgaggctgactattactgtcaggcgttcgaaagtagcactgaggtattcggcggagggaccaagctgaccgtcctaggtcagcccaaggctgcaccctcggtcactctgttcccgccctcctctgaggagcttcaagccaacaaggccacactggtgtgtctcatcagtgacttctacccgggagccgtgacagtggcctggaaggcagatagcagccccgtcaaggcgggagtggaaaccaccacaccctccaaacaaagcaacaacaagtacgcggccagcagctatctgagcctgacgcctgagcagtggaagtcccacagaagctacagctgccaggtcacgcatgaagggagcaccgtggagaagacagtggcccctacagaatgttca

SEQ ID NO: 452 - DNA, 15 bp, Artificial Sequence
  Synthetic polynucleotide
gattatagcatgagc

SEQ ID NO: 453 - DNA, 51 bp, Artificial Sequence
  Synthetic polynucleotide
ggcattaattggaatggtggtaggacacgttatgcagacgctgtgaagggc

SEQ ID NO: 454 - DNA, 36 bp, Artificial Sequence; identical to SEQ ID NO: 414
  Synthetic polynucleotide

SEQ ID NO: 455 - DNA, 33 bp, Artificial Sequence; identical to SEQ ID NO: 415
  Synthetic polynucleotide

SEQ ID NO: 456 - DNA, 21 bp, Artificial Sequence
  Synthetic polynucleotide
gaggacgccaaacgaccctcc

SEQ ID NO: 457 - DNA, 33 bp, Artificial Sequence
  Synthetic polynucleotide
tactcaacagacgccagtggtaatcatagggtg

SEQ ID NO: 458 - DNA, 363 bp, Artificial Sequence
  Synthetic polynucleotide
gaggtgcagctggtggagtctgggggaagtgtggtacggccgggggggtccctgagactctcctgtgcagcctctggattcaccgttgatgattatagcatgagctgggtccgccaagttccagggaaggggctggagtgggtctctggcattaattggaatggtggtaggacacgttatgcagacgctgtgaagggccgattcaccatctccagagacagcgccaaaaactccctgtatctgcaaatgaacagtctgagagccgaggatacggccttatattactgtgcgagagaattcaataacttcgagtccaactggttcgacccctggggccagggaaccctggtcaccgtctcctca

SEQ ID NO: 459 - DNA, 324 bp, Artificial Sequence
  Synthetic polynucleotide
tcctatgagctgacacagccaccctcggtgtcagtgtccccaggacaaacggccaggatcacctgctctggagatgcattgccaaaaaaatatgcttattggtaccagcagaagccaggccaggcccctgtgctggtcatctctgaggacgccaaacgaccctccgggatccctgagagattctctggctccagctcagggacaatggccaccttgactatcagtggggcccaggtggaggatgaagctgactactactgttactcaacagacgccagtggtaatcatagggtgttcggcggagggaccaagctgaccgtccta

SEQ ID NO: 460 - DNA, 1419 bp, Artificial Sequence
  Synthetic polynucleotide
atggacatgagggtgcccgctcagctcctggggctcctgctgctgtggctgagaggtgcgcgctgtgaggtgcagctggtggagtctgggggaagtgtggtacggccgggggggtccctgagactctcctgtgcagcctctggattcaccgttgatgattatagcatgagctgggtccgccaagttccagggaaggggctggagtgggtctctggcattaattggaatggtggtaggacacgttatgcagacgctgtgaagggccgattcaccatctccagagacagcgccaaaaactccctgtatctgcaaatgaacagtctgagagccgaggatacggccttatattactgtgcgagagaattcaataacttcgagtccaactggttcgacccctggggccagggaaccctggtcaccgtctcctcagcctccaccaagggcccatcggtcttccccctggcaccctcctccaagagcacctctgggggcacagcggccctgggctgcctggtcaaggactacttccccgaaccggtgacggtgtcgtggaactcaggcgccctgaccagcggcgtgcacaccttcccggctgtcctacagtcctcaggactctactccctcagcagcgtggtgaccgtgccctccagcagcttgggcacccagacctacatctgcaacgtgaatcacaagcccagcaacaccaaggtggacaagaaagttgagcccaaatcttgtgacaaaactcacacatgcccaccgtgcccagcacctgaactcctggggggaccgtcagtcttcctcttccccccaaaacccaaggacaccctcatgatctcccggacccctgaggtcacatgcgtggtggtggacgtgagccacgaagaccctgaggtcaagttcaactggtacgtggacggcgtggaggtgcataatgccaagacaaagccgtgcgaggagcagtacggcagcacgtaccgttgcgtcagcgtcctcaccgtcctgcaccaggactggctgaatggcaaggagtacaagtgcaaggtgtccaacaaagccctcccagcccccatcgagaaaaccatctccaaagccaaagggcagccccgagaaccacaggtgtacaccctgcccccatcccgggaggagatgaccaagaaccaggtcagcctgacctgcctggtcaaaggcttctatcccagcgacatcgccgtggagtgggagagcaatgggcagccggagaacaactacaagaccacgcctcccgtgctggactccgacggctccttcttcctctatagcaagctcaccgtggacaagagcaggtggcagcaggggaacgtcttctcatgctccgtgatgcatgaggctctgcacaaccactacacgcagaagagcctctccctgtctccgggtaaa

SEQ ID NO: 461 - DNA, 699 bp, Artificial Sequence
  Synthetic polynucleotide
atggcctgggctctgctgctcctcaccctcctcactcagggcacagggtcctgggcctcctatgagctgacacagccaccctcggtgtcagtgtccccaggacaaacggccaggatcacctgctctggagatgcattgccaaaaaaatatgcttattggtaccagcagaagccaggccaggcccctgtgctggtcatctctgaggacgccaaacgaccctccgggatccctgagagattctctggctccagctcagggacaatggccaccttgactatcagtggggcccaggtggaggatgaagctgactactactgttactcaacagacgccagtggtaatcatagggtgttcggcggagggaccaagctgaccgtcctaggtcagcccaaggctgcaccctcggtcactctgttcccgccctcctctgaggagcttcaagccaacaaggccacactggtgtgtctcatcagtgacttctacccgggagccgtgacagtggcctggaaggcagatagcagccccgtcaaggcgggagtggaaaccaccacaccctccaaacaaagcaacaacaagtacgcggccagcagctatctgagcctgacgcctgagcagtggaagtcccacagaagctacagctgccaggtcacgcatgaagggagcaccgtggagaagacagtggcccctacagaatgttca

SEQ ID NO: 462 - DNA, 15 bp, Artificial Sequence
  Synthetic polynucleotide
gattatagcatgagc

SEQ ID NO: 463 - DNA, 51 bp, Artificial Sequence
  Synthetic polynucleotide
ggcattaattggaatgctggtaggacacgttatgcagacgctgtgaagggc

SEQ ID NO: 464 - DNA, 36 bp, Artificial Sequence; identical to SEQ ID NO: 414
  Synthetic polynucleotide

SEQ ID NO: 465 - DNA, 33 bp, Artificial Sequence; identical to SEQ ID NO: 415
  Synthetic polynucleotide

SEQ ID NO: 466 - DNA, 21 bp, Artificial Sequence
  Synthetic polynucleotide
gaggacgccaaacgaccctcc

SEQ ID NO: 467 - DNA, 33 bp, Artificial Sequence; identical to SEQ ID NO: 457
  Synthetic polynucleotide

SEQ ID NO: 468 - DNA, 363 bp, Artificial Sequence
  Synthetic polynucleotide
gaggtgcagctggtggagtctgggggaagtgtggtacggccgggggggtccctgagactctcctgtgcagcctctggattcaccgttgatgattatagcatgagctgggtccgccaagttccagggaaggggctggagtgggtctctggcattaattggaatgctggtaggacacgttatgcagacgctgtgaagggccgattcaccatctccagagacagcgccaaaaactccctgtatctgcaaatgaacagtctgagagccgaggatacggccttatattactgtgcgagagaattcaataacttcgagtccaactggttcgacccctggggccagggaaccctggtcaccgtgtcctca

SEQ ID NO: 469 - DNA, 324 bp, Artificial Sequence; identical to SEQ ID NO: 459
  Synthetic polynucleotide

SEQ ID NO: 470 - DNA, 1419 bp, Artificial Sequence
  Synthetic polynucleotide
atggacatgagggtgcccgctcagctcctggggctcctgctgctgtggctgagaggtgcgcgctgtgaggtgcagctggtggagtctgggggaagtgtggtacggccgggggggtccctgagactctcctgtgcagcctctggattcaccgttgatgattatagcatgagctgggtccgccaagttccagggaaggggctggagtgggtctctggcattaattggaatgctggtaggacacgttatgcagacgctgtgaagggccgattcaccatctccagagacagcgccaaaaactccctgtatctgcaaatgaacagtctgagagccgaggatacggccttatattactgtgcgagagaattcaataacttcgagtccaactggttcgacccctggggccagggaaccctggtcaccgtgtcctcagcctccaccaagggcccatcggtcttccccctggcaccctcctccaagagcacctctgggggcacagcggccctgggctgcctggtcaaggactacttccccgaaccggtgacggtgtcgtggaactcaggcgccctgaccagcggcgtgcacaccttcccggctgtcctacagtcctcaggactctactccctcagcagcgtggtgaccgtgccctccagcagcttgggcacccagacctacatctgcaacgtgaatcacaagcccagcaacaccaaggtggacaagaaagttgagcccaaatcttgtgacaaaactcacacatgcccaccgtgcccagcacctgaactcctggggggaccgtcagtcttcctcttccccccaaaacccaaggacaccctcatgatctcccggacccctgaggtcacatgcgtggtggtggacgtgagccacgaagaccctgaggtcaagttcaactggtacgtggacggcgtggaggtgcataatgccaagacaaagccgtgcgaggagcagtacggcagcacgtaccgttgcgtcagcgtcctcaccgtcctgcaccaggactggctgaatggcaaggagtacaagtgcaaggtgtccaacaaagccctcccagcccccatcgagaaaaccatctccaaagccaaagggcagccccgagaaccacaggtgtacaccctgcccccatcccgggaggagatgaccaagaaccaggtcagcctgacctgcctggtcaaaggcttctatcccagcgacatcgccgtggagtgggagagcaatgggcagccggagaacaactacaagaccacgcctcccgtgctggactccgacggctccttcttcctctatagcaagctcaccgtggacaagagcaggtggcagcaggggaacgtcttctcatgctccgtgatgcatgaggctctgcacaaccactacacgcagaagagcctctccctgtctccgggcaaa

SEQ ID NO: 471 - DNA, 699 bp, Artificial Sequence; identical to SEQ ID NO: 461
  Synthetic polynucleotide

SEQ ID NO: 472 - protein, 330 aa, Artificial Sequence
  Synthetic peptide
ASTKGPSVFPLAPSSKSTSGGTAALGCLVKDYFPEPVTVSWNSGALTSGVHTFPAVLQSSGLYSLSSVVTVPSSSLGTQTYICNVNHKPSNTKVDKKVEPKSCDKTHTCPPCPAPELLGGPSVFLFPPKPKDTLMISRTPEVTCVVVDVSHEDPEVKFNWYVDGVEVHNAKTKPREEQYNSTYRVVSVLTVLHQDWLNGKEYKCKVSNKALPAPIEKTISKAKGQPREPQVYTLPPSREEMTKNQVSLTCLVKGFYPSDIAVEWESNGQPENNYDTTPPVLDSDGSFFLYSDLTVDKSRWQQGNVFSCSVMHEALHNHYTQDSLSLSPGK

SEQ ID NO: 473 - protein, 330 aa, Artificial Sequence; identical to SEQ ID NO: 295
  Synthetic peptide

SEQ ID NO: 474 - protein, 329 aa, Artificial Sequence
  Synthetic peptide
ASTKGPSVFPLAPSSKSTSGGTAALGCLVKDYFPEPVTVSWNSGALTSGVHTFPAVLQSSGLYSLSSVVTVPSSSLGTQTYICNVNHKPSNTKVDKKVEPKSCDKTHTCPPCPAPELLGGPSVFLFPPKPKDTLMISRTPEVTCVVVDVSHEDPEVKFNWYVDGVEVHNAKTKPREEQYNSTYRVVSVLTVLHQDWLNGKEYKCKVSNKALPAPIEKTISKAKGQPREPQVYTLPPSREEMTKNQVSLTCLVKGFYPSDIAVEWESNGQPENNYDTTPPVLDSDGSFFLYSDLTVDKSRWQQGNVFSCSVMHEALHNHYTQDSLSLSPG

SEQ ID NO: 475 - protein, 329 aa, Artificial Sequence; identical to SEQ ID NO: 297
  Synthetic peptide

SEQ ID NO: 476 - protein, 334 aa, Artificial Sequence
  Synthetic peptide
ASTKGPSVFPLAPSSKSTSGGTAALGCLVKDYFPEPVTVSWNSGALTSGVHTFPAVLQSSGLYSLSSVVTVPSSSLGTQTYICNVNHKPSNTKVDKKVEPKSCDKTHTCPPCPAPELLGGPSVFLFPPKPKDTLMISRTPEVTCVVVDVSHEDPEVKFNWYVDGVEVHNAKTKPREEQYNSTYRVVSVLTVLHQDWLNGKEYKCKVSNKALPAPIEKTISKAKGQPREPQVYTLPPSREEMTKNQVSLTCLVKGFYPSDIAVEWESNGQPENNYDTTPPVLDSDGSFFLYSDLTVDKSRWQQGNVFSCSVMHEALHNHYTQDSLSLSPGGGGGS

SEQ ID NO: 477 - protein, 334 aa, Artificial Sequence; identical to SEQ ID NO: 299
  Synthetic peptide

SEQ ID NO: 478 - protein, 330 aa, Artificial Sequence
  Synthetic peptide
ASTKGPSVFPLAPSSKSTSGGTAALGCLVKDYFPEPVTVSWNSGALTSGVHTFPAVLQSSGLYSLSSVVTVPSSSLGTQTYICNVNHKPSNTKVDKKVEPKSCDKTHTCPPCPAPELLGGPSVFLFPPKPKDTLMISRTPEVTCVVVDVSHEDPEVKFNWYVDGVEVHNAKTKPREEQYNSTYRVVSVLTVLHQDWLNGKEYKCKVSNKALPAPIEKTISKAKGQPREPQVYTLPPSREEMTENQVSLTCLVEGFYPSDIAVEWESNGQPENNYETTPPVLDSDGSFFLYSDLTVDKSRWQQGNVFSCSVMHEALHNHYTQKSLSLSPGK

SEQ ID NO: 479 - protein, 330 aa, Artificial Sequence
  Synthetic peptide
ASTKGPSVFPLAPSSKSTSGGTAALGCLVKDYFPEPVTVSWNSGALTSGVHTFPAVLQSSGLYSLSSVVTVPSSSLGTQTYICNVNHKPSNTKVDKKVEPKSCDKTHTCPPCPAPELLGGPSVFLFPPKPKDTLMISRTPEVTCVVVDVSHEDPEVKFNWYVDGVEVHNAKTKPREEQYNSTYRVVSVLTVLHQDWLNGKEYKCKVSNKALPAPIEKTISKAKGQPREPQVYTLPPSREKMTKNQVSLTCLVKGFYPSDIAVEWESNGQPENNYKTTPPVLKSDGSFFLYSKLTVDKSRWQQGNVFSCSVMHEALHNHYTQKSLSLSPGK

SEQ ID NO: 480 - protein, 329 aa, Artificial Sequence
  Synthetic peptide
ASTKGPSVFPLAPSSKSTSGGTAALGCLVKDYFPEPVTVSWNSGALTSGVHTFPAVLQSSGLYSLSSVVTVPSSSLGTQTYICNVNHKPSNTKVDKKVEPKSCDKTHTCPPCPAPELLGGPSVFLFPPKPKDTLMISRTPEVTCVVVDVSHEDPEVKFNWYVDGVEVHNAKTKPREEQYNSTYRVVSVLTVLHQDWLNGKEYKCKVSNKALPAPIEKTISKAKGQPREPQVYTLPPSREEMTENQVSLTCLVEGFYPSDIAVEWESNGQPENNYETTPPVLDSDGSFFLYSDLTVDKSRWQQGNVFSCSVMHEALHNHYTQKSLSLSPG

SEQ ID NO: 481 - protein, 329 aa, Artificial Sequence
  Synthetic peptide
ASTKGPSVFPLAPSSKSTSGGTAALGCLVKDYFPEPVTVSWNSGALTSGVHTFPAVLQSSGLYSLSSVVTVPSSSLGTQTYICNVNHKPSNTKVDKKVEPKSCDKTHTCPPCPAPELLGGPSVFLFPPKPKDTLMISRTPEVTCVVVDVSHEDPEVKFNWYVDGVEVHNAKTKPREEQYNSTYRVVSVLTVLHQDWLNGKEYKCKVSNKALPAPIEKTISKAKGQPREPQVYTLPPSREKMTKNQVSLTCLVKGFYPSDIAVEWESNGQPENNYKTTPPVLKSDGSFFLYSKLTVDKSRWQQGNVFSCSVMHEALHNHYTQKSLSLSPG

SEQ ID NO: 482 - protein, 334 aa, Artificial Sequence
  Synthetic peptide
ASTKGPSVFPLAPSSKSTSGGTAALGCLVKDYFPEPVTVSWNSGALTSGVHTFPAVLQSSGLYSLSSVVTVPSSSLGTQTYICNVNHKPSNTKVDKKVEPKSCDKTHTCPPCPAPELLGGPSVFLFPPKPKDTLMISRTPEVTCVVVDVSHEDPEVKFNWYVDGVEVHNAKTKPREEQYNSTYRVVSVLTVLHQDWLNGKEYKCKVSNKALPAPIEKTISKAKGQPREPQVYTLPPSREEMTENQVSLTCLVEGFYPSDIAVEWESNGQPENNYETTPPVLDSDGSFFLYSDLTVDKSRWQQGNVFSCSVMHEALHNHYTQKSLSLSPGGGGGS

SEQ ID NO: 483 - protein, 334 aa, Artificial Sequence
  Synthetic peptide
ASTKGPSVFPLAPSSKSTSGGTAALGCLVKDYFPEPVTVSWNSGALTSGVHTFPAVLQSSGLYSLSSVVTVPSSSLGTQTYICNVNHKPSNTKVDKKVEPKSCDKTHTCPPCPAPELLGGPSVFLFPPKPKDTLMISRTPEVTCVVVDVSHEDPEVKFNWYVDGVEVHNAKTKPREEQYNSTYRVVSVLTVLHQDWLNGKEYKCKVSNKALPAPIEKTISKAKGQPREPQVYTLPPSREKMTKNQVSLTCLVKGFYPSDIAVEWESNGQPENNYKTTPPVLKSDGSFFLYSKLTVDKSRWQQGNVFSCSVMHEALHNHYTQKSLSLSPGGGGGS

SEQ ID NO: 484 - protein, 330 aa, Artificial Sequence
  Synthetic peptide
ASTKGPSVFPLAPSSKSTSGGTAALGCLVKDYFPEPVTVSWNSGALTSGVHTFPAVLQSSGLYSLSSVVTVPSSSLGTQTYICNVNHKPSNTKVDKKVEPKSCDKTHTCPPCPAPELLGGPSVFLFPPKPKDTLMISRTPEVTCVVVDVSHEDPEVKFNWYVDGVEVHNAKTKPCEEQYGSTYRCVSVLTVLHQDWLNGKEYKCKVSNKALPAPIEKTISKAKGQPREPQVYTLPPSREEMTKNQVSLTCLVKGFYPSDIAVEWESNGQPENNYDTTPPVLDSDGSFFLYSDLTVDKSRWQQGNVFSCSVMHEALHNHYTQDSLSLSPGK

SEQ ID NO: 485 - protein, 330 aa, Artificial Sequence; identical to SEQ ID NO: 307
  Synthetic peptide

SEQ ID NO: 486 - protein, 329 aa, Artificial Sequence
  Synthetic peptide
ASTKGPSVFPLAPSSKSTSGGTAALGCLVKDYFPEPVTVSWNSGALTSGVHTFPAVLQSSGLYSLSSVVTVPSSSLGTQTYICNVNHKPSNTKVDKKVEPKSCDKTHTCPPCPAPELLGGPSVFLFPPKPKDTLMISRTPEVTCVVVDVSHEDPEVKFNWYVDGVEVHNAKTKPCEEQYGSTYRCVSVLTVLHQDWLNGKEYKCKVSNKALPAPIEKTISKAKGQPREPQVYTLPPSREEMTKNQVSLTCLVKGFYPSDIAVEWESNGQPENNYDTTPPVLDSDGSFFLYSDLTVDKSRWQQGNVFSCSVMHEALHNHYTQDSLSLSPG

SEQ ID NO: 487 - protein, 329 aa, Artificial Sequence; identical to SEQ ID NO: 309
  Synthetic peptide

SEQ ID NO: 488 - protein, 334 aa, Artificial Sequence
  Synthetic peptide
ASTKGPSVFPLAPSSKSTSGGTAALGCLVKDYFPEPVTVSWNSGALTSGVHTFPAVLQSSGLYSLSSVVTVPSSSLGTQTYICNVNHKPSNTKVDKKVEPKSCDKTHTCPPCPAPELLGGPSVFLFPPKPKDTLMISRTPEVTCVVVDVSHEDPEVKFNWYVDGVEVHNAKTKPCEEQYGSTYRCVSVLTVLHQDWLNGKEYKCKVSNKALPAPIEKTISKAKGQPREPQVYTLPPSREEMTKNQVSLTCLVKGFYPSDIAVEWESNGQPENNYDTTPPVLDSDGSFFLYSDLTVDKSRWQQGNVFSCSVMHEALHNHYTQDSLSLSPGGGGGS

SEQ ID NO: 489 - protein, 334 aa, Artificial Sequence; identical to SEQ ID NO: 311
  Synthetic peptide

SEQ ID NO: 490 - protein, 330 aa, Artificial Sequence
  Synthetic peptide
ASTKGPSVFPLAPSSKSTSGGTAALGCLVKDYFPEPVTVSWNSGALTSGVHTFPAVLQSSGLYSLSSVVTVPSSSLGTQTYICNVNHKPSNTKVDKKVEPKSCDKTHTCPPCPAPELLGGPSVFLFPPKPKDTLMISRTPEVTCVVVDVSHEDPEVKFNWYVDGVEVHNAKTKPCEEQYGSTYRCVSVLTVLHQDWLNGKEYKCKVSNKALPAPIEKTISKAKGQPREPQVYTLPPSREEMTENQVSLTCLVEGFYPSDIAVEWESNGQPENNYETTPPVLDSDGSFFLYSDLTVDKSRWQQGNVFSCSVMHEALHNHYTQKSLSLSPGK

SEQ ID NO: 491 - protein, 330 aa, Artificial Sequence
  Synthetic peptide
ASTKGPSVFPLAPSSKSTSGGTAALGCLVKDYFPEPVTVSWNSGALTSGVHTFPAVLQSSGLYSLSSVVTVPSSSLGTQTYICNVNHKPSNTKVDKKVEPKSCDKTHTCPPCPAPELLGGPSVFLFPPKPKDTLMISRTPEVTCVVVDVSHEDPEVKFNWYVDGVEVHNAKTKPCEEQYGSTYRCVSVLTVLHQDWLNGKEYKCKVSNKALPAPIEKTISKAKGQPREPQVYTLPPSREKMTKNQVSLTCLVKGFYPSDIAVEWESNGQPENNYKTTPPVLKSDGSFFLYSKLTVDKSRWQQGNVFSCSVMHEALHNHYTQKSLSLSPGK

SEQ ID NO: 492 - protein, 329 aa, Artificial Sequence
  Synthetic peptide
ASTKGPSVFPLAPSSKSTSGGTAALGCLVKDYFPEPVTVSWNSGALTSGVHTFPAVLQSSGLYSLSSVVTVPSSSLGTQTYICNVNHKPSNTKVDKKVEPKSCDKTHTCPPCPAPELLGGPSVFLFPPKPKDTLMISRTPEVTCVVVDVSHEDPEVKFNWYVDGVEVHNAKTKPCEEQYGSTYRCVSVLTVLHQDWLNGKEYKCKVSNKALPAPIEKTISKAKGQPREPQVYTLPPSREEMTENQVSLTCLVEGFYPSDIAVEWESNGQPENNYETTPPVLDSDGSFFLYSDLTVDKSRWQQGNVFSCSVMHEALHNHYTQKSLSLSPG

SEQ ID NO: 493 - protein, 329 aa, Artificial Sequence
  Synthetic peptide
ASTKGPSVFPLAPSSKSTSGGTAALGCLVKDYFPEPVTVSWNSGALTSGVHTFPAVLQSSGLYSLSSVVTVPSSSLGTQTYICNVNHKPSNTKVDKKVEPKSCDKTHTCPPCPAPELLGGPSVFLFPPKPKDTLMISRTPEVTCVVVDVSHEDPEVKFNWYVDGVEVHNAKTKPCEEQYGSTYRCVSVLTVLHQDWLNGKEYKCKVSNKALPAPIEKTISKAKGQPREPQVYTLPPSREKMTKNQVSLTCLVKGFYPSDIAVEWESNGQPENNYKTTPPVLKSDGSFFLYSKLTVDKSRWQQGNVFSCSVMHEALHNHYTQKSLSLSPG

SEQ ID NO: 494 - protein, 334 aa, Artificial Sequence
  Synthetic peptide
ASTKGPSVFPLAPSSKSTSGGTAALGCLVKDYFPEPVTVSWNSGALTSGVHTFPAVLQSSGLYSLSSVVTVPSSSLGTQTYICNVNHKPSNTKVDKKVEPKSCDKTHTCPPCPAPELLGGPSVFLFPPKPKDTLMISRTPEVTCVVVDVSHEDPEVKFNWYVDGVEVHNAKTKPCEEQYGSTYRCVSVLTVLHQDWLNGKEYKCKVSNKALPAPIEKTISKAKGQPREPQVYTLPPSREEMTENQVSLTCLVEGFYPSDIAVEWESNGQPENNYETTPPVLDSDGSFFLYSDLTVDKSRWQQGNVFSCSVMHEALHNHYTQKSLSLSPGGGGGS

SEQ ID NO: 495 - protein, 334 aa, Artificial Sequence
  Synthetic peptide
ASTKGPSVFPLAPSSKSTSGGTAALGCLVKDYFPEPVTVSWNSGALTSGVHTFPAVLQSSGLYSLSSVVTVPSSSLGTQTYICNVNHKPSNTKVDKKVEPKSCDKTHTCPPCPAPELLGGPSVFLFPPKPKDTLMISRTPEVTCVVVDVSHEDPEVKFNWYVDGVEVHNAKTKPCEEQYGSTYRCVSVLTVLHQDWLNGKEYKCKVSNKALPAPIEKTISKAKGQPREPQVYTLPPSREKMTKNQVSLTCLVKGFYPSDIAVEWESNGQPENNYKTTPPVLKSDGSFFLYSKLTVDKSRWQQGNVFSCSVMHEALHNHYTQKSLSLSPGGGGGS

SEQ ID NO: 496 - protein, 584 aa, Artificial Sequence
  Synthetic peptide
EVQLVESGGSVVRPGGSLRLSCAASGFTVDDYSMSWVRQVPGKGLEWVSGINWNAGRTRYADAVKGRFTISRDSAKNSLYLQMNSLRAEDTALYYCAREFNNFESNWFDPWGQGTLVTVSSASTKGPSVFPLAPSSKSTSGGTAALGCLVKDYFPEPVTVSWNSGALTSGVHTFPAVLQSSGLYSLSSVVTVPSSSLGTQTYICNVNHKPSNTKVDKKVEPKSCDKTHTCPPCPAPELLGGPSVFLFPPKPKDTLMISRTPEVTCVVVDVSHEDPEVKFNWYVDGVEVHNAKTKPCEEQYGSTYRCVSVLTVLHQDWLNGKEYKCKVSNKALPAPIEKTISKAKGQPREPQVYTLPPSREEMTKNQVSLTCLVKGFYPSDIAVEWESNGQPENNYKTTPPVLDSDGSFFLYSKLTVDKSRWQQGNVFSCSVMHEALHNHYTQKSLSLSPGKQGQDRHMIEMRQLIDIVDQLKNYVNDLVPEFLPAPEDVETNCEWSAFSCFQKAQLKSANTGNNERIINVSIKKLKAKPPSTNAGRRQKHRLTCPSCDSYEKKPPKEFLERFKSLLQKMIHQHLSSRTHGSEDS

SEQ ID NO: 497 - protein, 584 aa, Artificial Sequence
  Synthetic peptide
EVQLVESGGSVVRPGGSLRLSCAASGFTVDDYSMSWVRQVPGKGLEWVSGINWNAGRTRYADAVKGRFTISRDSAKNSLYLQMNSLRAEDTALYYCAREFNNFESNWFDPWGQGTLVTVSSASTKGPSVFPLAPSSKSTSGGTAALGCLVKDYFPEPVTVSWNSGALTSGVHTFPAVLQSSGLYSLSSVVTVPSSSLGTQTYICNVNHKPSNTKVDKKVEPKSCDKTHTCPPCPAPELLGGPSVFLFPPKPKDTLMISRTPEVTCVVVDVSHEDPEVKFNWYVDGVEVHNAKTKPCEEQYGSTYRCVSVLTVLHQDWLNGKEYKCKVSNKALPAPIEKTISKAKGQPREPQVYTLPPSREEMTKNQVSLTCLVKGFYPSDIAVEWESNGQPENNYKTTPPVLDSDGSFFLYSKLTVDKSRWQQGNVFSCSVMHEALHNHYTQKSLSLSPGKQGQDRHMIEMRQLIDIVDQLKNYVNDLVPEFLPAPEDVETNCEWSAFSCFQKAQLKSANTGNNERIINVSIKKLKEKPPSTNAGRRQKHRLTCPSCDSYEKKPPKEFLERFKSLLQKMIHQHLSSRTHGSEDS

SEQ ID NO: 498 - protein, 583 aa, Artificial Sequence
  Synthetic peptide
EVQLVESGGSVVRPGGSLRLSCAASGFTVDDYSMSWVRQVPGKGLEWVSGINWNAGRTRYADAVKGRFTISRDSAKNSLYLQMNSLRAEDTALYYCAREFNNFESNWFDPWGQGTLVTVSSASTKGPSVFPLAPSSKSTSGGTAALGCLVKDYFPEPVTVSWNSGALTSGVHTFPAVLQSSGLYSLSSVVTVPSSSLGTQTYICNVNHKPSNTKVDKKVEPKSCDKTHTCPPCPAPELLGGPSVFLFPPKPKDTLMISRTPEVTCVVVDVSHEDPEVKFNWYVDGVEVHNAKTKPCEEQYGSTYRCVSVLTVLHQDWLNGKEYKCKVSNKALPAPIEKTISKAKGQPREPQVYTLPPSREEMTKNQVSLTCLVKGFYPSDIAVEWESNGQPENNYKTTPPVLDSDGSFFLYSKLTVDKSRWQQGNVFSCSVMHEALHNHYTQKSLSLSPGQGQDRHMIEMRQLIDIVDQLKNYVNDLVPEFLPAPEDVETNCEWSAFSCFQKAQLKSANTGNNERIINVSIKKLKEKPPSTNAGRRQKHRLTCPSCDSYEKKPPKEFLERFKSLLQKMIHQHLSSRTHGSEDS

SEQ ID NO: 499 - protein, 588 aa, Artificial Sequence
  Synthetic peptide
EVQLVESGGSVVRPGGSLRLSCAASGFTVDDYSMSWVRQVPGKGLEWVSGINWNAGRTRYADAVKGRFTISRDSAKNSLYLQMNSLRAEDTALYYCAREFNNFESNWFDPWGQGTLVTVSSASTKGPSVFPLAPSSKSTSGGTAALGCLVKDYFPEPVTVSWNSGALTSGVHTFPAVLQSSGLYSLSSVVTVPSSSLGTQTYICNVNHKPSNTKVDKKVEPKSCDKTHTCPPCPAPELLGGPSVFLFPPKPKDTLMISRTPEVTCVVVDVSHEDPEVKFNWYVDGVEVHNAKTKPCEEQYGSTYRCVSVLTVLHQDWLNGKEYKCKVSNKALPAPIEKTISKAKGQPREPQVYTLPPSREEMTKNQVSLTCLVKGFYPSDIAVEWESNGQPENNYKTTPPVLDSDGSFFLYSKLTVDKSRWQQGNVFSCSVMHEALHNHYTQKSLSLSPGGGGGSQGQDRHMIEMRQLIDIVDQLKNYVNDLVPEFLPAPEDVETNCEWSAFSCFQKAQLKSANTGNNERIINVSIKKLKAKPPSTNAGRRQKHRLTCPSCDSYEKKPPKEFLERFKSLLQKMIHQHLSSRTHGSEDS

SEQ ID NO: 500 - protein, 588 aa, Artificial Sequence
  Synthetic peptide
EVQLVESGGSVVRPGGSLRLSCAASGFTVDDYSMSWVRQVPGKGLEWVSGINWNAGRTRYADAVKGRFTISRDSAKNSLYLQMNSLRAEDTALYYCAREFNNFESNWFDPWGQGTLVTVSSASTKGPSVFPLAPSSKSTSGGTAALGCLVKDYFPEPVTVSWNSGALTSGVHTFPAVLQSSGLYSLSSVVTVPSSSLGTQTYICNVNHKPSNTKVDKKVEPKSCDKTHTCPPCPAPELLGGPSVFLFPPKPKDTLMISRTPEVTCVVVDVSHEDPEVKFNWYVDGVEVHNAKTKPCEEQYGSTYRCVSVLTVLHQDWLNGKEYKCKVSNKALPAPIEKTISKAKGQPREPQVYTLPPSREEMTKNQVSLTCLVKGFYPSDIAVEWESNGQPENNYKTTPPVLDSDGSFFLYSKLTVDKSRWQQGNVFSCSVMHEALHNHYTQKSLSLSPGGGGGSQGQDRHMIEMRQLIDIVDQLKNYVNDLVPEFLPAPEDVETNCEWSAFSCFQKAQLKSANTGNNERIINVSIKKLKEKPPSTNAGRRQKHRLTCPSCDSYEKKPPKEFLERFKSLLQKMIHQHLSSRTHGSEDS

SEQ ID NO: 501 - protein, 583 aa, Artificial Sequence
  Synthetic peptide
EVQLVESGGSVVRPGGSLRLSCAASGFTVDDYSMSWVRQVPGKGLEWVSGINWNAGRTRYADAVKGRFTISRDSAKNSLYLQMNSLRAEDTALYYCAREFNNFESNWFDPWGQGTLVTVSSASTKGPSVFPLAPSSKSTSGGTAALGCLVKDYFPEPVTVSWNSGALTSGVHTFPAVLQSSGLYSLSSVVTVPSSSLGTQTYICNVNHKPSNTKVDKKVEPKSCDKTHTCPPCPAPELLGGPSVFLFPPKPKDTLMISRTPEVTCVVVDVSHEDPEVKFNWYVDGVEVHNAKTKPCEEQYGSTYRCVSVLTVLHQDWLNGKEYKCKVSNKALPAPIEKTISKAKGQPREPQVYTLPPSRKEMTKNQVSLTCLVKGFYPSDIAVEWESNGQPENNYKTTPPVLKSDGSFFLYSKLTVDKSRWQQGNVFSCSVMHEALHNHYTQKSLSLSPGQGQDRHMIEMRQLIDIVDQLKNYVNDLVPEFLPAPEDVETNCEWSAFSCFQKAQLKSANTGNNERIINVSIKKLKAKPPSTNAGRRQKHRLTCPSCDSYEKKPPKEFLERFKSLLQKMIHQHLSSRTHGSEDS

SEQ ID NO: 502 - protein, 583 aa, Artificial Sequence; identical to SEQ ID NO: 501
  Synthetic peptide

SEQ ID NO: 503 - protein, 583 aa, Artificial Sequence
  Synthetic peptide
EVQLVESGGSVVRPGGSLRLSCAASGFTVDDYSMSWVRQVPGKGLEWVSGINWNAGRTRYADAVKGRFTISRDSAKNSLYLQMNSLRAEDTALYYCAREFNNFESNWFDPWGQGTLVTVSSASTKGPSVFPLAPSSKSTSGGTAALGCLVKDYFPEPVTVSWNSGALTSGVHTFPAVLQSSGLYSLSSVVTVPSSSLGTQTYICNVNHKPSNTKVDKKVEPKSCDKTHTCPPCPAPELLGGPSVFLFPPKPKDTLMISRTPEVTCVVVDVSHEDPEVKFNWYVDGVEVHNAKTKPCEEQYGSTYRCVSVLTVLHQDWLNGKEYKCKVSNKALPAPIEKTISKAKGQPREPQVYTLPPSREKMTKNQVSLTCLVKGFYPSDIAVEWESNGQPENNYKTTPPVLKSDGSFFLYSKLTVDKSRWQQGNVFSCSVMHEALHNHYTQKSLSLSPGQGQDRHMIEMRQLIDIVDQLKNYVNDLVPEFLPAPEDVETNCEWSAFSCFQKAQLKSANTGNNERIINVSIKKLKAKPPSTNAGRRQKHRLTCPSCDSYEKKPPKEFLERFKSLLQKMIHQHLSSRTHGSEDS

SEQ ID NO: 504 - protein, 583 aa, Artificial Sequence
  Synthetic peptide
EVQLVESGGSVVRPGGSLRLSCAASGFTVDDYSMSWVRQVPGKGLEWVSGINWNAGRTRYADAVKGRFTISRDSAKNSLYLQMNSLRAEDTALYYCAREFNNFESNWFDPWGQGTLVTVSSASTKGPSVFPLAPSSKSTSGGTAALGCLVKDYFPEPVTVSWNSGALTSGVHTFPAVLQSSGLYSLSSVVTVPSSSLGTQTYICNVNHKPSNTKVDKKVEPKSCDKTHTCPPCPAPELLGGPSVFLFPPKPKDTLMISRTPEVTCVVVDVSHEDPEVKFNWYVDGVEVHNAKTKPCEEQYGSTYRCVSVLTVLHQDWLNGKEYKCKVSNKALPAPIEKTISKAKGQPREPQVYTLPPSRKEMTKNQVSLTCLVKGFYPSDIAVEWESNGQPENNYKTTPPVLKSDGSFFLYSKLTVDKSRWQQGNVFSCSVMHEALHNHYTQKSLSLSPGQGQDRHMIEMRQLIDIVDQLKNYVNDLVPEFLPAPEDVETNCEWSAFSCFQKAQLKSANTGNNERIINVSIKKLKEKPPSTNAGRRQKHRLTCPSCDSYEKKPPKEFLERFKSLLQKMIHQHLSSRTHGSEDS

SEQ ID NO: 505 - protein, 583 aa, Artificial Sequence; identical to SEQ ID NO: 504
  Synthetic peptide

SEQ ID NO: 506 - protein, 583 aa, Artificial Sequence
  Synthetic peptide
EVQLVESGGSVVRPGGSLRLSCAASGFTVDDYSMSWVRQVPGKGLEWVSGINWNAGRTRYADAVKGRFTISRDSAKNSLYLQMNSLRAEDTALYYCAREFNNFESNWFDPWGQGTLVTVSSASTKGPSVFPLAPSSKSTSGGTAALGCLVKDYFPEPVTVSWNSGALTSGVHTFPAVLQSSGLYSLSSVVTVPSSSLGTQTYICNVNHKPSNTKVDKKVEPKSCDKTHTCPPCPAPELLGGPSVFLFPPKPKDTLMISRTPEVTCVVVDVSHEDPEVKFNWYVDGVEVHNAKTKPCEEQYGSTYRCVSVLTVLHQDWLNGKEYKCKVSNKALPAPIEKTISKAKGQPREPQVYTLPPSREKMTKNQVSLTCLVKGFYPSDIAVEWESNGQPENNYKTTPPVLKSDGSFFLYSKLTVDKSRWQQGNVFSCSVMHEALHNHYTQKSLSLSPGQGQDRHMIEMRQLIDIVDQLKNYVNDLVPEFLPAPEDVETNCEWSAFSCFQKAQLKSANTGNNERIINVSIKKLKEKPPSTNAGRRQKHRLTCPSCDSYEKKPPKEFLERFKSLLQKMIHQHLSSRTHGSEDS

SEQ ID NO: 507 - protein, 588 aa, Artificial Sequence
  Synthetic peptide
QVQLVESGGGVVQPGRSLRLSCAASGFTFSNYGMHWVRQAPGKGLEWVALIWYDASKKYYAESVKGRFTISRDNSKNTLYLQMNSLRAEDTAAYYCARDPSSLTGSTGYYGMDVWGQGTTVTVSSASTKGPSVFPLAPSSKSTSGGTAALGCLVKDYFPEPVTVSWNSGALTSGVHTFPAVLQSSGLYSLSSVVTVPSSSLGTQTYICNVNHKPSNTKVDKKVEPKSCDKTHTCPPCPAPELLGGPSVFLFPPKPKDTLMISRTPEVTCVVVDVSHEDPEVKFNWYVDGVEVHNAKTKPCEEQYGSTYRCVSVLTVLHQDWLNGKEYKCKVSNKALPAPIEKTISKAKGQPREPQVYTLPPSREEMTKNQVSLTCLVKGFYPSDIAVEWESNGQPENNYKTTPPVLDSDGSFFLYSKLTVDKSRWQQGNVFSCSVMHEALHNHYTQKSLSLSPGKQGQDRHMIEMRQLIDIVDQLKNYVNDLVPEFLPAPEDVETNCEWSAFSCFQKAQLKSANTGNNERIINVSIKKLKAKPPSTNAGRRQKHRLTCPSCDSYEKKPPKEFLERFKSLLQKMIHQHLSSRTHGSEDS

SEQ ID NO: 508 - protein, 587 aa, Artificial Sequence
  Synthetic peptide
QVQLVESGGGVVQPGRSLRLSCAASGFTFSNYGMHWVRQAPGKGLEWVALIWYDASKKYYAESVKGRFTISRDNSKNTLYLQMNSLRAEDTAAYYCARDPSSLTGSTGYYGMDVWGQGTTVTVSSASTKGPSVFPLAPSSKSTSGGTAALGCLVKDYFPEPVTVSWNSGALTSGVHTFPAVLQSSGLYSLSSVVTVPSSSLGTQTYICNVNHKPSNTKVDKKVEPKSCDKTHTCPPCPAPELLGGPSVFLFPPKPKDTLMISRTPEVTCVVVDVSHEDPEVKFNWYVDGVEVHNAKTKPCEEQYGSTYRCVSVLTVLHQDWLNGKEYKCKVSNKALPAPIEKTISKAKGQPREPQVYTLPPSREEMTKNQVSLTCLVKGFYPSDIAVEWESNGQPENNYKTTPPVLDSDGSFFLYSKLTVDKSRWQQGNVFSCSVMHEALHNHYTQKSLSLSPGQGQDRHMIEMRQLIDIVDQLKNYVNDLVPEFLPAPEDVETNCEWSAFSCFQKAQLKSANTGNNERIINVSIKKLKAKPPSTNAGRRQKHRLTCPSCDSYEKKPPKEFLERFKSLLQKMIHQHLSSRTHGSEDS

SEQ ID NO: 509 - protein, 588 aa, Artificial Sequence
  Synthetic peptide
QVQLVESGGGVVQPGRSLRLSCAASGFTFSNYGMHWVRQAPGKGLEWVALIWYDASKKYYAESVKGRFTISRDNSKNTLYLQMNSLRAEDTAAYYCARDPSSLTGSTGYYGMDVWGQGTTVTVSSASTKGPSVFPLAPSSKSTSGGTAALGCLVKDYFPEPVTVSWNSGALTSGVHTFPAVLQSSGLYSLSSVVTVPSSSLGTQTYICNVNHKPSNTKVDKKVEPKSCDKTHTCPPCPAPELLGGPSVFLFPPKPKDTLMISRTPEVTCVVVDVSHEDPEVKFNWYVDGVEVHNAKTKPCEEQYGSTYRCVSVLTVLHQDWLNGKEYKCKVSNKALPAPIEKTISKAKGQPREPQVYTLPPSREEMTKNQVSLTCLVKGFYPSDIAVEWESNGQPENNYKTTPPVLDSDGSFFLYSKLTVDKSRWQQGNVFSCSVMHEALHNHYTQKSLSLSPGKQGQDRHMIEMRQLIDIVDQLKNYVNDLVPEFLPAPEDVETNCEWSAFSCFQKAQLKSANTGNNERIINVSIKKLKEKPPSTNAGRRQKHRLTCPSCDSYEKKPPKEFLERFKSLLQKMIHQHLSSRTHGSEDS

SEQ ID NO: 510 - protein, 587 aa, Artificial Sequence
  Synthetic peptide
QVQLVESGGGVVQPGRSLRLSCAASGFTFSNYGMHWVRQAPGKGLEWVALIWYDASKKYYAESVKGRFTISRDNSKNTLYLQMNSLRAEDTAAYYCARDPSSLTGSTGYYGMDVWGQGTTVTVSSASTKGPSVFPLAPSSKSTSGGTAALGCLVKDYFPEPVTVSWNSGALTSGVHTFPAVLQSSGLYSLSSVVTVPSSSLGTQTYICNVNHKPSNTKVDKKVEPKSCDKTHTCPPCPAPELLGGPSVFLFPPKPKDTLMISRTPEVTCVVVDVSHEDPEVKFNWYVDGVEVHNAKTKPCEEQYGSTYRCVSVLTVLHQDWLNGKEYKCKVSNKALPAPIEKTISKAKGQPREPQVYTLPPSREEMTKNQVSLTCLVKGFYPSDIAVEWESNGQPENNYKTTPPVLDSDGSFFLYSKLTVDKSRWQQGNVFSCSVMHEALHNHYTQKSLSLSPGQGQDRHMIEMRQLIDIVDQLKNYVNDLVPEFLPAPEDVETNCEWSAFSCFQKAQLKSANTGNNERIINVSIKKLKEKPPSTNAGRRQKHRLTCPSCDSYEKKPPKEFLERFKSLLQKMIHQHLSSRTHGSEDS

SEQ ID NO: 511 - protein, 592 aa, Artificial Sequence
  Synthetic peptide
QVQLVESGGGVVQPGRSLRLSCAASGFTFSNYGMHWVRQAPGKGLEWVALIWYDASKKYYAESVKGRFTISRDNSKNTLYLQMNSLRAEDTAAYYCARDPSSLTGSTGYYGMDVWGQGTTVTVSSASTKGPSVFPLAPSSKSTSGGTAALGCLVKDYFPEPVTVSWNSGALTSGVHTFPAVLQSSGLYSLSSVVTVPSSSLGTQTYICNVNHKPSNTKVDKKVEPKSCDKTHTCPPCPAPELLGGPSVFLFPPKPKDTLMISRTPEVTCVVVDVSHEDPEVKFNWYVDGVEVHNAKTKPCEEQYGSTYRCVSVLTVLHQDWLNGKEYKCKVSNKALPAPIEKTISKAKGQPREPQVYTLPPSREEMTKNQVSLTCLVKGFYPSDIAVEWESNGQPENNYKTTPPVLDSDGSFFLYSKLTVDKSRWQQGNVFSCSVMHEALHNHYTQKSLSLSPGGGGGSQGQDRHMIEMRQLIDIVDQLKNYVNDLVPEFLPAPEDVETNCEWSAFSCFQKAQLKSANTGNNERIINVSIKKLKAKPPSTNAGRRQKHRLTCPSCDSYEKKPPKEFLERFKSLLQKMIHQHLSSRTHGSEDS

SEQ ID NO: 512 - protein, 592 aa, Artificial Sequence
  Synthetic peptide
QVQLVESGGGVVQPGRSLRLSCAASGFTFSNYGMHWVRQAPGKGLEWVALIWYDASKKYYAESVKGRFTISRDNSKNTLYLQMNSLRAEDTAAYYCARDPSSLTGSTGYYGMDVWGQGTTVTVSSASTKGPSVFPLAPSSKSTSGGTAALGCLVKDYFPEPVTVSWNSGALTSGVHTFPAVLQSSGLYSLSSVVTVPSSSLGTQTYICNVNHKPSNTKVDKKVEPKSCDKTHTCPPCPAPELLGGPSVFLFPPKPKDTLMISRTPEVTCVVVDVSHEDPEVKFNWYVDGVEVHNAKTKPCEEQYGSTYRCVSVLTVLHQDWLNGKEYKCKVSNKALPAPIEKTISKAKGQPREPQVYTLPPSREEMTKNQVSLTCLVKGFYPSDIAVEWESNGQPENNYKTTPPVLDSDGSFFLYSKLTVDKSRWQQGNVFSCSVMHEALHNHYTQKSLSLSPGGGGGSQGQDRHMIEMRQLIDIVDQLKNYVNDLVPEFLPAPEDVETNCEWSAFSCFQKAQLKSANTGNNERIINVSIKKLKEKPPSTNAGRRQKHRLTCPSCDSYEKKPPKEFLERFKSLLQKMIHQHLSSRTHGSEDS

SEQ ID NO: 513 - protein, 587 aa, Artificial Sequence
  Synthetic peptide
QVQLVESGGGVVQPGRSLRLSCAASGFTFSNYGMHWVRQAPGKGLEWVALIWYDASKKYYAESVKGRFTISRDNSKNTLYLQMNSLRAEDTAAYYCARDPSSLTGSTGYYGMDVWGQGTTVTVSSASTKGPSVFPLAPSSKSTSGGTAALGCLVKDYFPEPVTVSWNSGALTSGVHTFPAVLQSSGLYSLSSVVTVPSSSLGTQTYICNVNHKPSNTKVDKKVEPKSCDKTHTCPPCPAPELLGGPSVFLFPPKPKDTLMISRTPEVTCVVVDVSHEDPEVKFNWYVDGVEVHNAKTKPCEEQYGSTYRCVSVLTVLHQDWLNGKEYKCKVSNKALPAPIEKTISKAKGQPREPQVYTLPPSRKEMTKNQVSLTCLVKGFYPSDIAVEWESNGQPENNYKTTPPVLKSDGSFFLYSKLTVDKSRWQQGNVFSCSVMHEALHNHYTQKSLSLSPGQGQDRHMIEMRQLIDIVDQLKNYVNDLVPEFLPAPEDVETNCEWSAFSCFQKAQLKSANTGNNERIINVSIKKLKAKPPSTNAGRRQKHRLTCPSCDSYEKKPPKEFLERFKSLLQKMIHQHLSSRTHGSEDS

SEQ ID NO: 514 - protein, 587 aa, Artificial Sequence; identical to SEQ ID NO: 513
  Synthetic peptide

SEQ ID NO: 515 - protein, 587 aa, Artificial Sequence
  Synthetic peptide
QVQLVESGGGVVQPGRSLRLSCAASGFTFSNYGMHWVRQAPGKGLEWVALIWYDASKKYYAESVKGRFTISRDNSKNTLYLQMNSLRAEDTAAYYCARDPSSLTGSTGYYGMDVWGQGTTVTVSSASTKGPSVFPLAPSSKSTSGGTAALGCLVKDYFPEPVTVSWNSGALTSGVHTFPAVLQSSGLYSLSSVVTVPSSSLGTQTYICNVNHKPSNTKVDKKVEPKSCDKTHTCPPCPAPELLGGPSVFLFPPKPKDTLMISRTPEVTCVVVDVSHEDPEVKFNWYVDGVEVHNAKTKPCEEQYGSTYRCVSVLTVLHQDWLNGKEYKCKVSNKALPAPIEKTISKAKGQPREPQVYTLPPSREKMTKNQVSLTCLVKGFYPSDIAVEWESNGQPENNYKTTPPVLKSDGSFFLYSKLTVDKSRWQQGNVFSCSVMHEALHNHYTQKSLSLSPGQGQDRHMIEMRQLIDIVDQLKNYVNDLVPEFLPAPEDVETNCEWSAFSCFQKAQLKSANTGNNERIINVSIKKLKAKPPSTNAGRRQKHRLTCPSCDSYEKKPPKEFLERFKSLLQKMIHQHLSSRTHGSEDS

SEQ ID NO: 516 - protein, 587 aa, Artificial Sequence
  Synthetic peptide
QVQLVESGGGVVQPGRSLRLSCAASGFTFSNYGMHWVRQAPGKGLEWVALIWYDASKKYYAESVKGRFTISRDNSKNTLYLQMNSLRAEDTAAYYCARDPSSLTGSTGYYGMDVWGQGTTVTVSSASTKGPSVFPLAPSSKSTSGGTAALGCLVKDYFPEPVTVSWNSGALTSGVHTFPAVLQSSGLYSLSSVVTVPSSSLGTQTYICNVNHKPSNTKVDKKVEPKSCDKTHTCPPCPAPELLGGPSVFLFPPKPKDTLMISRTPEVTCVVVDVSHEDPEVKFNWYVDGVEVHNAKTKPCEEQYGSTYRCVSVLTVLHQDWLNGKEYKCKVSNKALPAPIEKTISKAKGQPREPQVYTLPPSRKEMTKNQVSLTCLVKGFYPSDIAVEWESNGQPENNYKTTPPVLKSDGSFFLYSKLTVDKSRWQQGNVFSCSVMHEALHNHYTQKSLSLSPGQGQDRHMIEMRQLIDIVDQLKNYVNDLVPEFLPAPEDVETNCEWSAFSCFQKAQLKSANTGNNERIINVSIKKLKEKPPSTNAGRRQKHRLTCPSCDSYEKKPPKEFLERFKSLLQKMIHQHLSSRTHGSEDS

SEQ ID NO: 517 - protein, 587 aa, Artificial Sequence; identical to SEQ ID NO: 516
  Synthetic peptide

SEQ ID NO: 518 - protein, 587 aa, Artificial Sequence
  Synthetic peptide
QVQLVESGGGVVQPGRSLRLSCAASGFTFSNYGMHWVRQAPGKGLEWVALIWYDASKKYYAESVKGRFTISRDNSKNTLYLQMNSLRAEDTAAYYCARDPSSLTGSTGYYGMDVWGQGTTVTVSSASTKGPSVFPLAPSSKSTSGGTAALGCLVKDYFPEPVTVSWNSGALTSGVHTFPAVLQSSGLYSLSSVVTVPSSSLGTQTYICNVNHKPSNTKVDKKVEPKSCDKTHTCPPCPAPELLGGPSVFLFPPKPKDTLMISRTPEVTCVVVDVSHEDPEVKFNWYVDGVEVHNAKTKPCEEQYGSTYRCVSVLTVLHQDWLNGKEYKCKVSNKALPAPIEKTISKAKGQPREPQVYTLPPSREKMTKNQVSLTCLVKGFYPSDIAVEWESNGQPENNYKTTPPVLKSDGSFFLYSKLTVDKSRWQQGNVFSCSVMHEALHNHYTQKSLSLSPGQGQDRHMIEMRQLIDIVDQLKNYVNDLVPEFLPAPEDVETNCEWSAFSCFQKAQLKSANTGNNERIINVSIKKLKEKPPSTNAGRRQKHRLTCPSCDSYEKKPPKEFLERFKSLLQKMIHQHLSSRTHGSEDS

SEQ ID NO: 519 - protein, 583 aa, Artificial Sequence
  Synthetic peptide
EVQLVESGGSVVRPGGSLRLSCAASGFTVDDYSMSWVRQVPGKGLEWVSGINWNAGRTRYADAVKGRFTISRDSAKNSLYLQMNSLRAEDTALYYCAREFNNFESNWFDPWGQGTLVTVSSASTKGPSVFPLAPSSKSTSGGTAALGCLVKDYFPEPVTVSWNSGALTSGVHTFPAVLQSSGLYSLSSVVTVPSSSLGTQTYICNVNHKPSNTKVDKKVEPKSCDKTHTCPPCPAPELLGGPSVFLFPPKPKDTLMISRTPEVTCVVVDVSHEDPEVKFNWYVDGVEVHNAKTKPCEEQYGSTYRCVSVLTVLHQDWLNGKEYKCKVSNKALPAPIEKTISKAKGQPREPQVYTLPPSREEMTKNQVSLTCLVKGFYPSDIAVEWESNGQPENNYKTTPPVLDSDGSFFLYSKLTVDKSRWQQGNVFSCSVMHEALHNHYTQKSLSLSPGQGQDRHMIEMRQLIDIVDQLKNYVNDLVPEFLPAPEDVETNCEWSAFSCFQKAQLKSANTGNNERIINVSIKKLKAKPPSTNAGRRQKHRLTCPSCDSYEKKPPKEFLERFKSLLQKMIHQHLSSRTHGSEDS

SEQ ID NO: 520-543 - skipped (24 entries)

SEQ ID NO: 544 - protein, 330 aa, Artificial Sequence
  Synthetic Polypeptide
ASTKGPSVFPLAPSSKSTSGGTAALGCLVKDYFPEPVTVSWNSGALTSGVHTFPAVLQSSGLYSLSSVVTVPSSSLGTQTYICNVNHKPSNTKVDKKVEPKSCDKTHTCPPCPAPELLGGPSVFLFPPKPKDTLMISRTPEVTCVVVDVSHEDPEVKFNWYVDGVEVHNAKTKPREEQYNSTYRVVSVLTVDHHDWLNGKEYKCKVSNKALPAPIEKTISKAKGQPREPQVYTLPPSREEMTKNQVSLTCLVKGFYPSDIAVEWESNGQPENNYKTTPPVLDSDGSFFLYSKLTVDKSRWQQGNVFSCSVMHEALHSHYTQKSLSLSPGK

SEQ ID NO: 545 - protein, 330 aa, Artificial Sequence
  Synthetic Polypeptide
ASTKGPSVFPLAPSSKSTSGGTAALGCLVKDYFPEPVTVSWNSGALTSGVHTFPAVLQSSGLYSLSSVVTVPSSSLGTQTYICNVNHKPSNTKVDKKVEPKSCDKTHTCPPCPAPELLGGPSVFLFPPKPKDTLYITREPEVTCVVVDVSHEDPEVKFNWYVDGVEVHNAKTKPREEQYNSTYRVVSVLTVLHQDWLNGKEYKCKVSNKALPAPIEKTISKAKGQPREPQVYTLPPSREEMTKNQVSLTCLVKGFYPSDIAVEWESNGQPENNYKTTPPVLDSDGSFFLYSKLTVDKSRWQQGNVFSCSVMHEALHNHYTQKSLSLSPGK

SEQ ID NO: 546 - protein, 329 aa, Artificial Sequence
  Synthetic Polypeptide
ASTKGPSVFPLAPSSKSTSGGTAALGCLVKDYFPEPVTVSWNSGALTSGVHTFPAVLQSSGLYSLSSVVTVPSSSLGTQTYICNVNHKPSNTKVDKKVEPKSCDKTHTCPPCPAPELLGGPSVFLFPPKPKDTLMISRTPEVTCVVVDVSHEDPEVKFNWYVDGVEVHNAKTKPREEQYNSTYRVVSVLTVDHHDWLNGKEYKCKVSNKALPAPIEKTISKAKGQPREPQVYTLPPSREEMTKNQVSLTCLVKGFYPSDIAVEWESNGQPENNYKTTPPVLDSDGSFFLYSKLTVDKSRWQQGNVFSCSVMHEALHSHYTQKSLSLSPG

SEQ ID NO: 547 - protein, 329 aa, Artificial Sequence
  Synthetic Polypeptide
ASTKGPSVFPLAPSSKSTSGGTAALGCLVKDYFPEPVTVSWNSGALTSGVHTFPAVLQSSGLYSLSSVVTVPSSSLGTQTYICNVNHKPSNTKVDKKVEPKSCDKTHTCPPCPAPELLGGPSVFLFPPKPKDTLYITREPEVTCVVVDVSHEDPEVKFNWYVDGVEVHNAKTKPREEQYNSTYRVVSVLTVLHQDWLNGKEYKCKVSNKALPAPIEKTISKAKGQPREPQVYTLPPSREEMTKNQVSLTCLVKGFYPSDIAVEWESNGQPENNYKTTPPVLDSDGSFFLYSKLTVDKSRWQQGNVFSCSVMHEALHNHYTQKSLSLSPG

SEQ ID NO: 548 - protein, 334 aa, Artificial Sequence
  Synthetic Polypeptide
ASTKGPSVFPLAPSSKSTSGGTAALGCLVKDYFPEPVTVSWNSGALTSGVHTFPAVLQSSGLYSLSSVVTVPSSSLGTQTYICNVNHKPSNTKVDKKVEPKSCDKTHTCPPCPAPELLGGPSVFLFPPKPKDTLMISRTPEVTCVVVDVSHEDPEVKFNWYVDGVEVHNAKTKPREEQYNSTYRVVSVLTVDHHDWLNGKEYKCKVSNKALPAPIEKTISKAKGQPREPQVYTLPPSREEMTKNQVSLTCLVKGFYPSDIAVEWESNGQPENNYKTTPPVLDSDGSFFLYSKLTVDKSRWQQGNVFSCSVMHEALHSHYTQKSLSLSPGGGGGS

SEQ ID NO: 549 - protein, 334 aa, Artificial Sequence
  Synthetic Polypeptide
ASTKGPSVFPLAPSSKSTSGGTAALGCLVKDYFPEPVTVSWNSGALTSGVHTFPAVLQSSGLYSLSSVVTVPSSSLGTQTYICNVNHKPSNTKVDKKVEPKSCDKTHTCPPCPAPELLGGPSVFLFPPKPKDTLYITREPEVTCVVVDVSHEDPEVKFNWYVDGVEVHNAKTKPREEQYNSTYRVVSVLTVLHQDWLNGKEYKCKVSNKALPAPIEKTISKAKGQPREPQVYTLPPSREEMTKNQVSLTCLVKGFYPSDIAVEWESNGQPENNYKTTPPVLDSDGSFFLYSKLTVDKSRWQQGNVFSCSVMHEALHNHYTQKSLSLSPGGGGGS

SEQ ID NO: 550 - protein, 330 aa, Artificial Sequence
  Synthetic Polypeptide
ASTKGPSVFPLAPSSKSTSGGTAALGCLVKDYFPEPVTVSWNSGALTSGVHTFPAVLQSSGLYSLSSVVTVPSSSLGTQTYICNVNHKPSNTKVDKKVEPKSCDKTHTCPPCPAPELLGGPSVFLFPPKPKDTLMISRTPEVTCVVVDVSHEDPEVKFNWYVDGVEVHNAKTKPCEEQYGSTYRCVSVLTVDHHDWLNGKEYKCKVSNKALPAPIEKTISKAKGQPREPQVYTLPPSREEMTKNQVSLTCLVKGFYPSDIAVEWESNGQPENNYKTTPPVLDSDGSFFLYSKLTVDKSRWQQGNVFSCSVMHEALHSHYTQKSLSLSPGK

SEQ ID NO: 551 - protein, 330 aa, Artificial Sequence
  Synthetic Polypeptide
ASTKGPSVFPLAPSSKSTSGGTAALGCLVKDYFPEPVTVSWNSGALTSGVHTFPAVLQSSGLYSLSSVVTVPSSSLGTQTYICNVNHKPSNTKVDKKVEPKSCDKTHTCPPCPAPELLGGPSVFLFPPKPKDTLYITREPEVTCVVVDVSHEDPEVKFNWYVDGVEVHNAKTKPCEEQYGSTYRCVSVLTVLHQDWLNGKEYKCKVSNKALPAPIEKTISKAKGQPREPQVYTLPPSREEMTKNQVSLTCLVKGFYPSDIAVEWESNGQPENNYKTTPPVLDSDGSFFLYSKLTVDKSRWQQGNVFSCSVMHEALHNHYTQKSLSLSPGK

SEQ ID NO: 552 - protein, 329 aa, Artificial Sequence
  Synthetic Polypeptide
ASTKGPSVFPLAPSSKSTSGGTAALGCLVKDYFPEPVTVSWNSGALTSGVHTFPAVLQSSGLYSLSSVVTVPSSSLGTQTYICNVNHKPSNTKVDKKVEPKSCDKTHTCPPCPAPELLGGPSVFLFPPKPKDTLMISRTPEVTCVVVDVSHEDPEVKFNWYVDGVEVHNAKTKPCEEQYGSTYRCVSVLTVDHHDWLNGKEYKCKVSNKALPAPIEKTISKAKGQPREPQVYTLPPSREEMTKNQVSLTCLVKGFYPSDIAVEWESNGQPENNYKTTPPVLDSDGSFFLYSKLTVDKSRWQQGNVFSCSVMHEALHSHYTQKSLSLSPG

SEQ ID NO: 553 - protein, 329 aa, Artificial Sequence
  Synthetic Polypeptide
ASTKGPSVFPLAPSSKSTSGGTAALGCLVKDYFPEPVTVSWNSGALTSGVHTFPAVLQSSGLYSLSSVVTVPSSSLGTQTYICNVNHKPSNTKVDKKVEPKSCDKTHTCPPCPAPELLGGPSVFLFPPKPKDTLYITREPEVTCVVVDVSHEDPEVKFNWYVDGVEVHNAKTKPCEEQYGSTYRCVSVLTVLHQDWLNGKEYKCKVSNKALPAPIEKTISKAKGQPREPQVYTLPPSREEMTKNQVSLTCLVKGFYPSDIAVEWESNGQPENNYKTTPPVLDSDGSFFLYSKLTVDKSRWQQGNVFSCSVMHEALHNHYTQKSLSLSPG

SEQ ID NO: 554 - protein, 334 aa, Artificial Sequence
  Synthetic Polypeptide
ASTKGPSVFPLAPSSKSTSGGTAALGCLVKDYFPEPVTVSWNSGALTSGVHTFPAVLQSSGLYSLSSVVTVPSSSLGTQTYICNVNHKPSNTKVDKKVEPKSCDKTHTCPPCPAPELLGGPSVFLFPPKPKDTLYITREPEVTCVVVDVSHEDPEVKFNWYVDGVEVHNAKTKPCEEQYGSTYRCVSVLTVLHQDWLNGKEYKCKVSNKALPAPIEKTISKAKGQPREPQVYTLPPSREEMTKNQVSLTCLVKGFYPSDIAVEWESNGQPENNYKTTPPVLDSDGSFFLYSKLTVDKSRWQQGNVFSCSVMHEALHNHYTQKSLSLSPGGGGGS

SEQ ID NO: 555 - protein, 334 aa, Artificial Sequence; identical to SEQ ID NO: 554
  Synthetic Polypeptide

SEQ ID NO: 556 - protein, 450 aa, Artificial Sequence
  Synthetic Polypeptide
EVQLVESGGSVVRPGGSLRLSCAASGFTVDDYSMSWVRQVPGKGLEWVSGINWNAGRTRYADAVKGRFTISRDSAKNSLYLQMNSLRAEDTALYYCAREFNNFESNWFDPWGQGTLVTVSSASTKGPSVFPLAPSSKSTSGGTAALGCLVKDYFPEPVTVSWNSGALTSGVHTFPAVLQSSGLYSLSSVVTVPSSSLGTQTYICNVNHKPSNTKVDKKVEPKSCDKTHTCPPCPAPELLGGPSVFLFPPKPKDTLMISRTPEVTCVVVDVSHEDPEVKFNWYVDGVEVHNAKTKPCEEQYGSTYRCVSVLTVLHQDWLNGKEYKCKVSNKALPAPIEKTISKAKGQPREPQVYTLPPSREEMTKNQVSLTCLVKGFYPSDIAVEWESNGQPENNYDTTPPVLDSDGSFFLYSDLTVDKSRWQQGNVFSCSVMHEALHNHYTQKSLSLSPG

SEQ ID NO: 557 - protein, 450 aa, Artificial Sequence
  Synthetic Polypeptide
EVQLVESGGSVVRPGGSLRLSCAASGFTVDDYSMSWVRQVPGKGLEWVSGINWNAGRTRYADAVKGRFTISRDSAKNSLYLQMNSLRAEDTALYYCAREFNNFESNWFDPWGQGTLVTVSSASTKGPSVFPLAPSSKSTSGGTAALGCLVKDYFPEPVTVSWNSGALTSGVHTFPAVLQSSGLYSLSSVVTVPSSSLGTQTYICNVNHKPSNTKVDKKVEPKSCDKTHTCPPCPAPELLGGPSVFLFPPKPKDTLMISRTPEVTCVVVDVSHEDPEVKFNWYVDGVEVHNAKTKPCEEQYGSTYRCVSVLTVLHQDWLNGKEYKCKVSNKALPAPIEKTISKAKGQPREPQVYTLPPSREEMTKNQVSLTCLVKGFYPSDIAVEWESNGQPENNYDTTPPVLDSDGSFFLYSDLTVDKSRWQQGNVFSCSVMHEALHNHYTQDSLSLSPG

SEQ ID NO: 558 - protein, 450 aa, Artificial Sequence
  Synthetic Polypeptide
EVQLVESGGSVVRPGGSLRLSCAASGFTVDDYSMSWVRQVPGKGLEWVSGINWNAGRTRYADAVKGRFTISRDSAKNSLYLQMNSLRAEDTALYYCAREFNNFESNWFDPWGQGTLVTVSSASTKGPSVFPLAPSSKSTSGGTAALGCLVKDYFPEPVTVSWNSGALTSGVHTFPAVLQSSGLYSLSSVVTVPSSSLGTQTYICNVNHKPSNTKVDKKVEPKSCDKTHTCPPCPAPELLGGPSVFLFPPKPKDTLMISRTPEVTCVVVDVSHEDPEVKFNWYVDGVEVHNAKTKPCEEQYGSTYRCVSVLTVLHQDWLNGKEYKCKVSNKALPAPIEKTISKAKGQPREPQVYTLPPSREEMTENQVSLTCLVEGFYPSDIAVEWESNGQPENNYETTPPVLDSDGSFFLYSDLTVDKSRWQQGNVFSCSVMHEALHNHYTQKSLSLSPG

SEQ ID NO: 559 - protein, 454 aa, Artificial Sequence
  Synthetic Polypeptide
QVQLVESGGGVVQPGRSLRLSCAASGFTFSNYGMHWVRQAPGKGLEWVALIWYDASKKYYAESVKGRFTISRDNSKNTLYLQMNSLRAEDTAAYYCARDPSSLTGSTGYYGMDVWGQGTTVTVSSASTKGPSVFPLAPSSKSTSGGTAALGCLVKDYFPEPVTVSWNSGALTSGVHTFPAVLQSSGLYSLSSVVTVPSSSLGTQTYICNVNHKPSNTKVDKKVEPKSCDKTHTCPPCPAPELLGGPSVFLFPPKPKDTLMISRTPEVTCVVVDVSHEDPEVKFNWYVDGVEVHNAKTKPCEEQYGSTYRCVSVLTVLHQDWLNGKEYKCKVSNKALPAPIEKTISKAKGQPREPQVYTLPPSREEMTKNQVSLTCLVKGFYPSDIAVEWESNGQPENNYDTTPPVLDSDGSFFLYSDLTVDKSRWQQGNVFSCSVMHEALHNHYTQKSLSLSPG

SEQ ID NO: 560 - protein, 454 aa, Artificial Sequence
  Synthetic Polypeptide
QVQLVESGGGVVQPGRSLRLSCAASGFTFSNYGMHWVRQAPGKGLEWVALIWYDASKKYYAESVKGRFTISRDNSKNTLYLQMNSLRAEDTAAYYCARDPSSLTGSTGYYGMDVWGQGTTVTVSSASTKGPSVFPLAPSSKSTSGGTAALGCLVKDYFPEPVTVSWNSGALTSGVHTFPAVLQSSGLYSLSSVVTVPSSSLGTQTYICNVNHKPSNTKVDKKVEPKSCDKTHTCPPCPAPELLGGPSVFLFPPKPKDTLMISRTPEVTCVVVDVSHEDPEVKFNWYVDGVEVHNAKTKPCEEQYGSTYRCVSVLTVLHQDWLNGKEYKCKVSNKALPAPIEKTISKAKGQPREPQVYTLPPSREEMTKNQVSLTCLVKGFYPSDIAVEWESNGQPENNYDTTPPVLDSDGSFFLYSDLTVDKSRWQQGNVFSCSVMHEALHNHYTQDSLSLSPG

SEQ ID NO: 561 - protein, 454 aa, Artificial Sequence
  Synthetic Polypeptide
QVQLVESGGGVVQPGRSLRLSCAASGFTFSNYGMHWVRQAPGKGLEWVALIWYDASKKYYAESVKGRFTISRDNSKNTLYLQMNSLRAEDTAAYYCARDPSSLTGSTGYYGMDVWGQGTTVTVSSASTKGPSVFPLAPSSKSTSGGTAALGCLVKDYFPEPVTVSWNSGALTSGVHTFPAVLQSSGLYSLSSVVTVPSSSLGTQTYICNVNHKPSNTKVDKKVEPKSCDKTHTCPPCPAPELLGGPSVFLFPPKPKDTLMISRTPEVTCVVVDVSHEDPEVKFNWYVDGVEVHNAKTKPCEEQYGSTYRCVSVLTVLHQDWLNGKEYKCKVSNKALPAPIEKTISKAKGQPREPQVYTLPPSREEMTENQVSLTCLVEGFYPSDIAVEWESNGQPENNYETTPPVLDSDGSFFLYSDLTVDKSRWQQGNVFSCSVMHEALHNHYTQKSLSLSPG

What is claimed is:

1. A method for modulating the product quality of a recombinant asymmetric multispecific antibody expressed by a cell during cell culture comprising the steps:
a) establishing at least two cell cultures each inoculated with the same cell line expressing the asymmetric multispecific antibody;
b) culturing at least one cell culture at a first temperature regime that consists of a single temperature and at least one cell culture at a second temperature regime;
c) comparing at least one product-related impurity in the cell culture at each temperature regime;
d) selecting the temperature regime that reduces the expression of at least one product-related impurity comprising an unpaired or mis-paired long heavy chain;
e) culturing the cell line at the selected temperature regime; and
f) harvesting the recombinant asymmetric multispecific antibody.

2. The method according to claim 1, wherein the first temperature regime is selected from 36° C. to 37° C.

3. The method according to claim 1, wherein the second temperature regime comprises a temperature shift from a first temperature to a second temperature that is higher or lower than the first temperature.

4. The method according to claim 3, wherein the second temperature is selected from 28° C. to 35° C.

5. The method according to claim 3, wherein the second temperature is about 1° C. to about 9° C. lower than the first temperature.

6. The method according to claim 1, wherein the first temperature regime is a single temperature from 36° C. to 37° C. and the second temperature regime comprises at least one temperature shift from a first temperature of 36° C. to 37° C. to a second temperature of 28° C. to 35° C.

7. The method according to claim 1, wherein the product-related impurity results from an imbalance in the ratio of long heavy chain to short heavy chain.

8. The method according to claim 1, wherein the product-related impurity comprises an unpaired or mis-paired long heavy chain.

9. The method according to claim 8, wherein the product-related impurity comprises an unpaired or mis-paired long heavy chain and is selected from a homodimer, half antibody, protein aggregate, antibody fragment, combination of antibody fragments, and unpaired antibody fragments.

10. The method according to claim 1, wherein the cell culture temperature regime may be further selected for modulation of the amount of expression, productivity, growth, yield, and/or other desired product quality attributes of the asymmetric multispecific antibody.

11. The method according to claim 1, wherein the asymmetric multispecific antibody comprises a mutein.

12. The method according to claim 1, wherein the asymmetric multispecific antibody is an asymmetric multispecific anti-PD-1 antibody comprising a single IL-21 mutein attached to one of the two antibody heavy chains of the anti-PD-1 antibody.

13. The method according to claim 7, wherein the long heavy chain comprises an anti-PD-1 antibody heavy chain having an attached IL-21 mutein.

14. A method for modulating the product quality of a recombinant asymmetric multispecific antibody comprising a mutein expressed by a cell during cell culture comprising the steps:
a) establishing at least two cell cultures each inoculated with the same cell line expressing the asymmetric multispecific antibody;
b) culturing at least one cell culture at a first temperature regime that consists of a single temperature and at least one cell culture at a second temperature regime;
c) comparing at least one product-related impurity comprising an unpaired or mis-paired long heavy chain produced by a cell culture at each temperature regime; and
d) selecting the temperature regime that reduces the expression of at least one product-related impurity comprising an unpaired or mis-paired long heavy chain.

15. The method according to claim 14, wherein the mutein is an IL-21 mutein.

16. The method according to claim 15, wherein the IL-21 mutein comprises amino acid substitutions at any two of positions 5, 9, 73, and 76 of SEQ ID NO: 1; wherein said amino acid substitutions are selected from: A, E, or Q at position 5, E or A at position 9, A or Q at position 73, and A, D, or E at position 76.

17. The method according to claim 15, wherein the IL-21 mutein comprises the amino acid sequence of any of SEQ ID NOs: 233-245.

18. The method according to claim 14, wherein the asymmetric multispecific antibody comprises a mutein attached to the C-terminus of one of the two antibody heavy chains of an anti-PD-1 antibody.

19. The method according to claim 18, wherein the anti-PD-1 antibody comprising:
two light chains, each comprising a LC CDR1, LC CDR2, and LC CDR3 comprising the amino acid sequence of SEQ ID NOs: 385, 386, and 387, respectively; and
two heavy chains, each comprising a HC CDR1, LC CDR2, and LC CDR3 comprising the amino acid sequence of SEQ ID NOs: 382, 383, and 384, respectively.

20. The method according to claim 18, wherein the anti-PD-1 antibody comprises two light chains comprising the amino acid sequence of SEQ ID NO: 389 and two heavy chains comprising the amino acid sequence of SEQ ID NO: 388.

21. The method according to claim 18, wherein the anti-PD-1 antibody comprises:
two light chains, each comprising a LC CDR1, LC CDR2, and LC CDR3 comprising the amino acid sequence of SEQ ID NOs: 365, 366, and 367, respectively; and
two heavy chains, each comprising a HC CDR1, HC CDR2, and HC CDR3 comprising the amino acid sequence of SEQ ID NOs: 362, 363, and 364, respectively.

22. The method according to claim 18, wherein the anti-PD-1 antibody comprises two light chains comprising the amino acid sequence of SEQ ID NO: 369 and two heavy chains comprising the amino acid sequence of SEQ ID NO: 368.

23. The method according to claim 18, wherein the anti-PD-1 antibody comprises:
(i) two light chains, each comprising the amino acid sequence of SEQ ID NO: 391; a heavy chain attached to an IL-21 mutein comprising the amino acid sequence of any one of SEQ ID NOs: 501-506; and a heavy chain comprising the amino acid sequence of any one of SEQ ID NOs: 556-558; or
(ii) two light chains, each comprising the amino acid sequence of SEQ ID NO: 371; a heavy chain attached to a single IL-21 mutein comprising an amino acid sequence of any one of SEQ ID NOs: 513-518; and a heavy chain comprising the amino acid sequence of any one of SEQ ID NOs: 559-561.

24. The method according to claim 18, wherein the anti-PD-1 antibody comprises:
two light chains, each comprising the amino acid sequence of SEQ ID NO: 391;
one heavy chain comprising the amino acid sequence of SEQ ID NO: 556; and
one heavy chain attached to an IL-21 mutein comprising the amino acid sequence of SEQ ID NO: 501.

25. The method according to claim 18, wherein the anti-PD-1 antibody comprises:
two light chains, each comprising the amino acid sequence of SEQ ID NO: 371;
one heavy chain comprising the amino acid sequence of SEQ ID NO: 559; and
one heavy chain attached to an IL-21 mutein comprising the amino acid sequence of SEQ ID NO: 513.

26. The method according to claim 14, wherein the asymmetric multispecific antibody comprises an IL-21 mutein attached to the C-terminus of one of the two antibody heavy chains of an anti-PD-1 antibody.

27. The method according to claim 14, wherein the long heavy chain comprises an anti-PD-1 antibody heavy chain having an attached IL-21 mutein.

28. A method for modulating the product quality of a conjugate of an IL-21 mutein linked to the C-terminus of one of the two antibody heavy chains of an anti-PD-1 antibody expressed by a cell during cell culture comprising the steps:
a) establishing a cell culture inoculated with a cell line expressing the antibody;
b) culturing the cells at 36+1° C. for the duration of the culture; and
c) harvesting the antibody;
wherein amount of at least one product-related impurity resulting from an imbalance in the ratio of long heavy chain to short heavy chain in the harvested cell culture is decreased compared to the amount of the same product-related impurity in the harvest from a cell culture exposed to a temperature of 32° C. to 34° C. at some point during the culture.

29. A method for selecting a cell line expressing an asymmetric multispecific antibody comprising a mutein comprising the steps:
a) establishing at least one clonally derived cell line expressing the antibody;
b) establishing at least two cell cultures from one or more of the clonally derived cell lines, wherein at least one cell culture from each cell line is cultured at a first temperature regime and at least one cell culture from each cell line is cultured at a second temperature regime;
c) comparing the expression of at least one product-related impurity comprising an unpaired or mis-paired long heavy chain produced by the cells cultured at each temperature regime; and
d) selecting a cell line that resulted in reduced expression of at least one product-related impurity comprising an unpaired or mis-paired long heavy chain.

30. The method of claim 29, wherein the selected cell line is then cultured at the temperature regime that resulted in reduced expression of at least one product-related impurity comprising an unpaired or mis-paired long heavy chain.

31. The method according to claim 29, wherein the first temperature regime is selected from about 36° C. to about 37° C.

32. The method according to claim 29, wherein the second temperature regime comprises a temperature shift from a first temperature to a second temperature that is higher or lower than the first temperature.

33. The method according to claim 32, wherein the second temperature is selected from about 28° C. to about 35° C.

34. The method according to claim 29, wherein the second temperature is about 1° C. to 9® C. lower than the first temperature.

35. The method according to claim 29, wherein the first temperature regime is a single temperature from 36° C. to 37° C. and the second temperature regime comprises at least one temperature shift from a first temperature of 36° C. to 37° C. to a second temperature of 28° C. to 35° C.

36. The method according to claim 29, wherein the product-related impurity comprising an unpaired or mis-paired long heavy chain results from an imbalance in the ratio of long heavy chain to short heavy chain.

37. The method according to claim 35, wherein the product-related impurity comprising an unpaired or mis-paired long heavy chain results from an increase in the ratio of the long heavy chain to the short heavy chain.

38. The method according to claim 29, wherein the product-related impurity comprising an unpaired or mis-paired long heavy chain and is selected from a homodimer, half antibody, protein aggregate, antibody fragment, combination of antibody fragments, and unpaired antibody fragments.

39. The method according to claim 29, wherein the cell culture temperature regime may be further selected for a temperature regime that also modulates the amount of expression, productivity, growth, and/or other desired product quality attributes of the asymmetric multispecific antibody.

40. The method according to claim 29, wherein the asymmetric multispecific antibody is an asymmetric multispecific anti-PD-1 antibody comprising a single IL-21 mutein attached to one of the two antibody heavy chains of the anti-PD-1 antibody.

41. The method according to claim 29, wherein the long heavy chain comprises an anti-PD-1 antibody heavy chain having an attached IL-21 mutein.

42. A method for modulating production of at least one recombinant asymmetric multispecific antibody product-related impurity comprising an antibody heavy chain having an attached IL-21 mutein during cell culture through cell culture temperature comprising the steps:
a) selecting the temperature regime that reduces the expression of at least one product-related impurity comprising an unpaired or mis-paired long heavy chain comprising a long heavy chain;
b) culturing the cell line at the selected temperature regime; and
c) harvesting the recombinant asymmetric multispecific antibody.

43. The method according to claim 42, wherein the asymmetric multispecific antibody is an asymmetric multispecific anti-PD-1 antibody comprising a single IL-21 mutein attached to one of the two antibody heavy chains of the anti-PD-1 antibody.

44. The method according to claim 42, wherein the long heavy chain comprises an anti-PD-1 antibody heavy chain having an attached IL-21 mutein.

45. A method for producing an isolated, purified, recombinant asymmetric multispecific antibody, the method comprising the steps:
a) isolating at least one single stably transformed cell expressing the asymmetric multispecific antibody and establishing a clonally derived culture;
b) establishing at least two cell cultures from one or more of the clonally derived cultures;
c) culturing at least one cell culture from each clonally derived culture at a first temperature regime comprising a single temperature and culturing at least one cell culture from each clonally derived culture at a second temperature regime;
d) comparing the amount of at least one product-related impurity comprising an unpaired or mis-paired long heavy chain produced by the cells cultured at each temperature regime;
e) selecting the cell culture that modulated production of the product related impurity;
f) establishing a cell line expressing the asymmetric multispecific antibody from the selected cell culture;
g) inoculating a bioreactor with the cell line expressing the asymmetric multispecific antibody;
h) culturing the cells to express the asymmetric multispecific antibody at the temperature regime that modulated the production of the product-related impurity;
i) harvesting the recombinant asymmetric multispecific antibody from the cell culture;
j) processing the recombinant multispecific antibody through one or more chromatography unit operations; and
k) obtaining an isolated, purified, recombinant asymmetric multispecific antibody.

46. An isolated, purified, recombinant multispecific antibody according to claim 45.

47. A pharmaceutical composition comprising the isolated, purified, recombinant multispecific antibody according to claim 45.

48. The method according to claim 45, wherein the asymmetric multispecific antibody is an asymmetric multispecific anti-PD-1 antibody comprising a single IL-21 mutein attached to one of the two antibody heavy chains of the anti-PD-1 antibody.

49. The method according to claim 48, wherein the long heavy chain comprises an anti-PD-1 antibody heavy chain having an attached IL-21 mutein.

50. A method for controlling the growth of cells in a nanofluidic chamber of a nanofluidic chip comprising the steps of:
(a) isolating a single cell in to a nanofluidic chamber of a nanofluidic chip, wherein said cell comprises an expression construct capable of expressing a recombinant protein;
(b) culturing the cell at a first temperature;
(c) at a predetermined point, culturing the cells at a second temperature; and
(d) exporting the cells out of the nanofluidic chamber and into a culture vessel.

51. The method according to claim 50, wherein the number of cells per chamber at export is lower compared to a single cell cultured under similar conditions at a constant temperature for the duration of the culture.

52. The method according to claim 50, wherein the first temperature is selected from 35° C. to 37° C.

53. The method according to claim 50, wherein the second temperature is selected from 28° C. to 34° C.

54. The method according to claim 50, wherein the second temperature is about 1° C. to about 9° C. lower than the first temperature.

55. The method according to claim 50, wherein the first temperature is 36° C. and the second temperature is 32° C. to 32° C.

56. The method according to claim 50, wherein the predetermined point is on day 3 to day 5 of the culture.

57. The method according to claim 50, wherein export is on day 4 to day 8 of the culture.

58. The method according to claim 50, wherein the nanofluidic chip comprises 1758 chambers, 3,500 chambers, 11,000 chambers, 14,000 chamber, or 20,000 chambers.

59. The method according to claim 50, wherein the culture vessel is a multi-well plate.

60. A method for minimizing cell cross contamination during export of cells grown in a nanofluidic chamber of a nanofluidic chip comprising the steps of:
(a) isolating a single cell in to a nanofluidic chamber of a nanofluidic chip, wherein said cell comprises an expression construct capable of expressing a recombinant protein;
(b) culturing the cell at a first temperature;
(c) at a predetermined point, culturing the cells at a second temperature; and
(d) exporting the cells out of the nanofluidic chamber and into a culture vessel;
wherein the number of cells per chamber at export is lower compared to a single cell cultured under similar conditions a constant temperature for the duration of the culture.

61. A method to improve clone selection for cells grown in a nanofluidic chamber of a nanofluidic chip comprising the steps of:
(a) isolating a single cell in to a nanofluidic chamber of a nanofluidic chip, wherein said cell comprises an expression construct capable of expressing a recombinant protein;
(b) culturing the cell at a first temperature;
(c) lowering the temperature of the culture to a second temperature no earlier than day 3 of the culture; and
(d) exporting the cells out of the nanofluidic chamber at least one to four days after the temperature shift.

62. The method according to claim 61, wherein the protein secretion profiles measured before and after the temperature shift are compared.
